(19) United States
(12) Patent Application Publication
(10) Pub. No.: US 2025/0354146 A1
(43) Pub. Date: Nov. 20, 2025

(54) MODIFIED ANTISENSE OLIGONUCLEOTIDES TARGETING FOXG1

(71) Applicant: EliGab Tx LLC, Manhasset, NY (US)

(72) Inventor: Scott REICH, Manhasset, NY (US)

(21) Appl. No.: 18/872,678

(22) PCT Filed: Jun. 21, 2023
(86) PCT No.: PCT/US2023/068781

§ 371 Date: Dec. 6, 2024

Related U.S. Application Data
(60) Provisional application No. 63/354,488, filed on Jun. 22, 2022.

(51) Int. Cl. C12N 15/113

(52) U.S. Cl. CPC C12N 15/113; C12N 2310/113; C12N 2310/315; C12N 2310/321; C12N 2310/3231

(57) ABSTRACT

Provided herein are compositions and methods for treating and/or ameliorating FOXG1 syndrome or the symptoms associated therewith. The compositions and methods disclosed herein utilize antisense oligonucleotides that target FOXG1 in order to modulate FOXG1 by, for example, increasing the amount of FOXG1 (e.g., mRNA encoding a FOXG1 protein or FOXG1 protein) in a cell, thereby restoring FOXG1 function.

### RELATED APPLICATIONS

[0001] This is a U.S. National Stage Application based on International Application No. PCT/US2023/068781, filed on Jun. 21, 2023, and claims priority to U.S. Provisional Patent Application Ser. No. 63/354,488, filed on Jun. 22, 2022, both of which are incorporated herein by reference in their entireties for all purposes.

### INCORPORATION OF THE SEQUENCE LISTING

[0002] This application contains a Sequence Listing, which is hereby incorporated herein by reference in its entirety. The accompanying Sequence Listing, named “062691-503001WO—SEQUENCE LISTING—Jun. 26, 2023”, was created on Jun. 26, 2023 and is 2.7 MB.

### BACKGROUND

[0003] FOXG1 syndrome is a rare neurodevelopmental disorder associated with heterozygous variants in the forkhead box G1 (FOXG1) gene and is characterized by impaired neurological development and/or altered brain physiology. Observed phenotypes of FOXG1 syndrome primarily include a particular pattern of structural alterations in the brain resulting from de novo mutations in the FOXG1 gene. Such structural alterations include a thin or underdeveloped corpus callosum that connects between the right and left hemispheres of the brain, reduced sulci and gyri formation on the surface of the brain, and/or a reduced amount of white matter. FOXG1 syndrome affects most aspects of development in children and the main clinical features observed in association with FOXG1 variants comprise impairment of postnatal growth, primary (congenital) or secondary (postnatal) microcephaly, severe intellectual disability with absent speech development, epilepsy, stereotypies and dyskinesia, abnormal sleep patterns, unexplained episodes of crying, gastroesophageal reflux, and recurrent aspiration.

### SUMMARY

[0004] Provided herein are compositions and methods for treating and/or ameliorating FOXG1 syndrome or the symptoms associated therewith. The compositions and methods disclosed herein utilize antisense oligonucleotides that target FOXG1 in order to modulate FOXG1 by, for example, increasing the amount of functional FOXG1 protein in a cell, thereby restoring or increasing FOXG1 function. The ability to restore or increase functional FOXG1 in cells provides a foundation for the treatment of FOXG1 syndrome or alleviating symptoms associated therewith.

[0005] Provided herein are modified antisense oligonucleotides comprising a sequence complementary to a target nucleic acid sequence of a FOXG1 nucleic acid. In some embodiments, the antisense oligonucleotide comprises a modification within an inter-nucleoside linker or within a nucleoside. In some embodiments, the modification comprises a modified inter-nucleoside linker and a modified nucleoside. In some embodiments, the modified antisense oligonucleotide comprises at least 1 to 10 modified inter-nucleoside linkers. In some embodiments, the modified antisense oligonucleotide comprises at least 10 to 20 modified inter-nucleoside linkers. In some embodiments, the modified antisense oligonucleotide comprises at least 1 to 10 modified nucleosides. In some embodiments, the modified antisense oligonucleotide comprises at least 10 to 20 modified nucleosides. In some embodiments, the modified antisense oligonucleotide comprises at least 10%, at least 25%, at least 50%, at least 75%, at least 80%, or at least 90% modified inter-nucleoside linkers. In some embodiments, the modified antisense oligonucleotide comprises at least 10%, at least 25%, at least 50%, at least 75%, at least 80%, or at least 90% modified nucleosides. In some embodiments, the modified antisense oligonucleotide comprises 16 nucleotides, 17 nucleotides, 18 nucleotides, 19 nucleotides, 20 nucleotides, 21 nucleotides, 22 nucleotides, or 23 nucleotides.

[0006] In some embodiments, the FOXG1 nucleic acid comprises a 5′ untranslated region (5′ UTR) and a 3′ untranslated region (3′ UTR), wherein the target sequence is located at the 5′ UTR or the 3′ UTR of the FOXG1 nucleic acid. In some embodiments, the modified antisense oligonucleotide hybridizes to a region of FOXG1 selected from any one of the regions of Table 1 or Table 2. In some embodiments, the target sequence is located within a NM_005249.5_2000-2200_as region of the FOXG1 nucleic acid. In some embodiments, the target sequence is located within a NM_005249.5_2900-3000_as region of the FOXG1 nucleic acid. In some embodiments, the modified antisense oligonucleotide is a single-stranded modified oligonucleotide. In some embodiments, the FOXG1 nucleic acid molecule is a ribonucleic acid (RNA). In some embodiments, the RNA molecule is a messenger RNA (mRNA) molecule.

[0007] In some embodiments, the modified antisense oligonucleotide inhibits regulatory elements that reduce translation of the FOXG1 RNA. In some embodiments, the modified antisense oligonucleotide inhibits regulatory elements that reduce stability of the FOXG1 RNA. In some embodiments, the modified antisense oligonucleotide inhibits regulatory elements located within the 3′ UTR of the FOXG1 RNA. In some embodiments, the modified antisense oligonucleotide sterically inhibits (1) miRNA binding and suppression of FOXG1 translation and/or (2) an RNA binding protein from binding to a regulatory sequence of the FOXG1 RNA and destabilizing the FOXG1 RNA. In some embodiments, the modified antisense oligonucleotide inhibits nuclease digestion of the FOXG1 RNA. In some embodiments, the cell is located in a brain of an individual. Further provided are methods of modulating expression of a FOXG1 in a cell, comprising contacting the cell with the modified antisense oligonucleotides described herein. In some embodiments, the cell is located in a brain of an individual. Also provided are methods of treating or ameliorating a FOXG1 disease or disorder in an individual having or at risk of having, the FOXG1 disease or disorder, comprising administering to the individual the modified antisense oligonucleotides described herein, thereby treating or ameliorating a FOXG1 disease in the individual.

[0008] In some embodiments, the individual is a human. In some embodiments, the individual comprises a mutated FOXG1 gene. In some embodiments, the individual has a FOXG1 disease or disorder. In some embodiments, the FOXG1 disease or disorder is FOXG1 syndrome. In some embodiments, the FOXG1 nucleic acid is a ribonucleic acid (RNA). In some embodiments, the RNA is a messenger RNA (mRNA). In some embodiments, the modified antisense oligonucleotide inhibits regulatory elements that reduce translation or stability of the FOXG1 RNA, thereby increasing the amount of FOXG1 protein in the cell. In some embodiments, modulating expression comprises increasing expression of a FOXG1 protein in the cell. In some embodiments, modulating expression comprises increasing stability or half-life of the FOXG1 nucleic acid in the cell. In some embodiments, modulating expression comprises increasing translation of a FOXG1 protein in the cell. In some embodiments, the modified antisense oligonucleotide is administered to the individual by intrathecal injection, intracerebroventricular injection, inhalation, parenteral injection or infusion, or orally.

### INCORPORATION BY REFERENCE

[0009] All publications, patents, and patent applications mentioned in this specification are herein incorporated by reference to the same extent as if each individual publication, patent, or patent application was specifically and individually indicated to be incorporated by reference.

### BRIEF DESCRIPTION OF THE DRAWINGS

[0010] The novel features of the disclosure are set forth with particularity in the appended claims. A better understanding of the features and advantages of the present disclosure will be obtained by reference to the following detailed description that sets forth illustrative embodiments, in which the principles of the disclosure are utilized, and the accompanying drawings of which:

[0011] FIG. 1 demonstrates exemplary lengths of modifies ASOs.

[0012] FIG. 2 demonstrates exemplary modified inter-nucleoside linker formats of modified ASOs.

[0013] FIGS. 3A and 3B demonstrates exemplary modified nucleosides formats of modified ASOs.

### DETAILED DESCRIPTION

[0014] Deletions or mutations in a single allele of the forkhead box G1 (FOXG1) gene cause FOXG1 syndrome. FOXG1 syndrome is a rare disease characterized by developmental delay, severe intellectual disability, epilepsy, absent language, and dyskinesis. Hallmarks of altered brain physiologies associated with FOXG1 syndrome include cortical atrophy and agenesis of the corpus callosum. The FOXG1 gene/protein is a member of the forkhead transcription factor family and is expressed specifically in neural progenitor cells of the forebrain. The FOXG1 gene is composed of one coding exon and notably, the location or type of FOXG1 mutation can be associated with or indicative of clinical severity.

[0015] The FOXG1 protein plays an important role in brain development, particularly in a region of the embryonic brain known as the telencephalon. The telencephalon ultimately develops into several critical structures, including the largest part of the brain (i.e., cerebrum), which controls most voluntary activity, language, sensory perception, learning, and memory. A shortage of functional FOXG1 protein, as observed in individuals having mutations or deletions in a single FOXG1 allele (i.e., heterozygous individuals), disrupts normal brain patterning and development.

[0016] Accordingly, disclosed herein are compositions and methods useful for increasing an amount of functional FOXG1 (e.g., FOXG1 protein or FOXG1 messenger ribonucleic acid (mRNA)) in a cell having a shortage of functional FOXG1. Such compositions and methods are useful in their application for treating individual having a FOXG1-related disease or disorder wherein the lack or shortage of functional FOXG1 protein can be remedied. In order to achieve an increase of FOXG1 expression in cells or in an individual, antisense oligonucleotides targeting FOXG1 are used.

### Modified ASOs

[0017] Antisense oligonucleotides (ASOs) are small (˜18-30 nucleotides), synthetic, single-stranded nucleic acid polymers that can be employed to modulate gene expression by various mechanisms. Antisense oligonucleotides (ASOs) can be subdivided into two major categories: RNase H competent and steric block. For RNase H competent antisense oligonucleotides, the endogenous RNase H enzyme recognizes RNA-DNA heteroduplex substrates that are formed when antisense oligonucleotides bind to their cognate mRNA transcripts to catalyze the degradation of RNA. Steric block oligonucleotides are antisense oligonucleotides (ASOs) that are designed to bind to target transcripts with high affinity but do not induce target transcript degradation.

[0018] Steric block antisense oligonucleotides (ASOs) can be designed to inhibit translation inhibition, interfere with upstream open reading frames that negatively regulate translation in order to activate protein expression, inhibit RNA degradation, inhibit miRNA suppression, and influence polyadenylation signals to increase transcript stability. Accordingly, provided herein are steric block antisense oligonucleotides (ASOs) useful for modulating the expression and/or amount of functional FOXG1 (i.e., functional FOXG1) in a cell (e.g., mRNA encoding a functional FOXG1 protein or a FOXG1 protein). Specifically, the antisense oligonucleotides (ASOs) are useful for increasing the expression and/or amount of FOXG1 (i.e., functional FOXG1) in a cell (e.g., mRNA encoding a functional FOXG1 protein or a functional FOXG1 protein). The antisense oligonucleotides (ASOs) disclosed herein achieve this effect by targeting a FOXG1 nucleic acid encoding a functional FOXG1 protein and inhibiting translation inhibition, interfering with upstream open reading frames (uORFs), inhibiting RNA degradation, inhibiting miRNA suppression of expression, and/or increasing RNA stability to ultimately increase the number of RNA transcripts encoding FOXG1 and/or protein expression of a FOXG1 (i.e., functional FOXG1) protein.

[0019] In order to achieve effective targeting of a FOXG1 RNA (e.g., messenger RNA), the antisense oligonucleotides disclosed herein (ASOs) comprise a sequence complementary to a sequence of the FOXG1 RNA, wherein the complementary sequence binds and/or hybridizes to a sequence of the FOXG1 RNA. Accordingly, disclosed herein are antisense oligonucleotides (ASOs) comprising a sequence complementary to a target nucleic acid sequence of a FOXG1 nucleic acid (e.g., a FOXG1 mRNA). Generally, mRNA transcripts comprise a 5′ untranslated region (5′ UTR) and a 3′ untranslated region (3′ UTR). The antisense oligonucleotides (ASOs) disclosed herein target the 5′ UTR or the 3′ UTR of a FOXG1 mRNA transcript. In order to achieve targeting of the 5′ UTR or 3′ UTR, the antisense oligonucleotide (ASOs) comprise a sequence complementary to a target sequence located at the 5′ UTR or the 3′ UTR of the FOXG1 mRNA. In some embodiments, the target sequence is located at or within the 5′ UTR. In some embodiments, the target sequence is located at or within the 3′ UTR. In certain embodiments, the antisense oligonucleotide targeting the 3′ UTR comprises a nucleobase sequence complementary to a sequence within the nucleotides contained in the FOXG1 nucleic acid regions specified by the 2000-2200 or 2900-3000 coordinates of the NM_005249.5 mRNA entry in RefSeq. In some embodiments, the antisense oligonucleotides are included in an ASO composition comprising more than one ASO. In certain embodiments, the ASO composition comprises 2, 3, 4, 5, or more ASOs. Such ASO compositions are suitable for use in the methods described herein. TABLES 2-3 disclose regions of the FOXG1 mRNA associated with an increase in FOXG1 expression when targeted by antisense oligonucleotides (ASOs). In some embodiments, the antisense oligonucleotides (ASOs) disclosed herein, targeting the 5′ UTR or 3′ UTR, increase the amount of FOXG1 protein and/or mRNA transcripts in a cell and/or individual. In certain embodiments, targeting a FOXG1 nucleic acid encoding a functional FOXG1 protein inhibits translation inhibition, interferes with upstream open reading frames (uORFs), inhibits RNA degradation, and/or increases RNA stability to ultimately increase protein expression of a functional FOXG1 protein.

[0020] In some embodiments, the modified antisense oligonucleotides (ASOs) described herein (e.g., hybridizing to the regions of FOXG1 described in TABLES 2-3) comprise at least 15, at least 16, at least 17, at least 18, at least 19, at least 20, at least 21, at least 22, at least 23, at least 24, or at least 25 nucleotides. In some embodiments, the modified antisense oligonucleotides (ASOs) described herein (e.g., hybridizing to the regions of FOXG1 described in TABLES 2-3) comprise 17 to 23 nucleotides.

[0021] In some embodiments, the modified antisense oligonucleotides (ASOs) comprise 15 nucleotides to 25 nucleotides. In some embodiments, the modified antisense oligonucleotides (ASOs) comprise 15 nucleotides to 16 nucleotides, 15 nucleotides to 17 nucleotides, 15 nucleotides to 18 nucleotides, 15 nucleotides to 19 nucleotides, 15 nucleotides to 20 nucleotides, 15 nucleotides to 21 nucleotides, 15 nucleotides to 22 nucleotides, 15 nucleotides to 23 nucleotides, 15 nucleotides to 24 nucleotides, 15 nucleotides to 25 nucleotides, 16 nucleotides to 17 nucleotides, 16 nucleotides to 18 nucleotides, 16 nucleotides to 19 nucleotides, 16 nucleotides to 20 nucleotides, 16 nucleotides to 21 nucleotides, 16 nucleotides to 22 nucleotides, 16 nucleotides to 23 nucleotides, 16 nucleotides to 24 nucleotides, 16 nucleotides to 25 nucleotides, 17 nucleotides to 18 nucleotides, 17 nucleotides to 19 nucleotides, 17 nucleotides to 20 nucleotides, 17 nucleotides to 21 nucleotides, 17 nucleotides to 22 nucleotides, 17 nucleotides to 23 nucleotides, 17 nucleotides to 24 nucleotides, 17 nucleotides to 25 nucleotides, 18 nucleotides to 19 nucleotides, 18 nucleotides to 20 nucleotides, 18 nucleotides to 21 nucleotides, 18 nucleotides to 22 nucleotides, 18 nucleotides to 23 nucleotides, 18 nucleotides to 24 nucleotides, 18 nucleotides to 25 nucleotides, 19 nucleotides to 20 nucleotides, 19 nucleotides to 21 nucleotides, 19 nucleotides to 22 nucleotides, 19 nucleotides to 23 nucleotides, 19 nucleotides to 24 nucleotides, 19 nucleotides to 25 nucleotides, 20 nucleotides to 21 nucleotides, 20 nucleotides to 22 nucleotides, 20 nucleotides to 23 nucleotides, 20 nucleotides to 24 nucleotides, 20 nucleotides to 25 nucleotides, 21 nucleotides to 22 nucleotides, 21 nucleotides to 23 nucleotides, 21 nucleotides to 24 nucleotides, 21 nucleotides to 25 nucleotides, 22 nucleotides to 23 nucleotides, 22 nucleotides to 24 nucleotides, 22 nucleotides to 25 nucleotides, 23 nucleotides to 24 nucleotides, 23 nucleotides to 25 nucleotides, or 24 nucleotides to 25 nucleotides. In some embodiments, the modified antisense oligonucleotides (ASOs) comprise 15 nucleotides, 16 nucleotides, 17 nucleotides, 18 nucleotides, 19 nucleotides, 20 nucleotides, 21 nucleotides, 22 nucleotides, 23 nucleotides, 24 nucleotides, or 25 nucleotides. In some embodiments, the modified antisense oligonucleotides (ASOs) comprise at least 15 nucleotides, 16 nucleotides, 17 nucleotides, 18 nucleotides, 19 nucleotides, 20 nucleotides, 21 nucleotides, 22 nucleotides, 23 nucleotides, or 24 nucleotides. In some embodiments, the modified antisense oligonucleotides (ASOs) comprise at most 16 nucleotides, 17 nucleotides, 18 nucleotides, 19 nucleotides, 20 nucleotides, 21 nucleotides, 22 nucleotides, 23 nucleotides, 24 nucleotides, or 25 nucleotides.

[0022] In order to improve the pharmacodynamic, pharmacokinetic, and biodistribution properties of antisense oligonucleotides (ASOs), the antisense oligonucleotides can be designed and engineered to comprise one or more chemical modifications (e.g., a modified inter-nucleoside linker, a modified nucleoside, or a combination thereof). Accordingly, in some embodiments, the antisense oligonucleotide is a modified oligonucleotide. In some embodiments, the antisense oligonucleotide comprises one or more modifications. In certain embodiments, the modification comprises a modified inter-nucleoside linker, a modified nucleoside, or a combination thereof.

### Modified Inter-Nucleoside Linkers

[0023] Modification of the inter-nucleoside linker (i.e., backbone) can be utilized to increase pharmacodynamic, pharmacokinetic, and biodistribution properties. For example, inter-nucleoside linker modifications prevent or reduce degradation by cellular nucleases, thus increasing the pharmacokinetics and bioavailability of the modified antisense oligonucleotide. Generally, a modified inter-nucleoside linker includes any linker other than phosphodiester (PO) liners, that covalently couples two nucleosides together. In some embodiments, the modified inter-nucleoside linker increases the nuclease resistance of the modified antisense oligonucleotide compared to a phosphodiester linker. For naturally occurring antisense oligonucleotides, the inter-nucleoside linker includes phosphate groups creating a phosphodiester bond between adjacent nucleosides. Modified inter-nucleoside linkers are particularly useful in stabilizing antisense oligonucleotides for in vivo use and may serve to protect against nuclease cleavage.

[0024] In some embodiments, the modified antisense oligonucleotide comprises one or more inter-nucleoside linkers modified from the natural phosphodiester to a linker that is for example more resistant to nuclease attack. In some embodiments, all of the inter-nucleoside linkers of the modified antisense oligonucleotide, or contiguous nucleotide sequence thereof, are modified. In some embodiments, all of the inter-nucleoside linkers of the modified antisense oligonucleotide, or contiguous nucleotide sequence thereof, are nuclease-resistant inter-nucleoside linkers. In some embodiments, the inter-nucleoside linkage comprises sulfur(S), such as a phosphorothioate inter-nucleoside linkage.

[0025] Phosphorothioate (PS) inter-nucleoside linkers are particularly useful due to nuclease resistance and improved pharmacokinetics. In some embodiments, one or more of the inter-nucleoside linkers of the modified antisense oligonucleotide, or contiguous nucleotide sequence thereof, comprise a phosphorothioate inter-nucleoside linker. In some embodiments, all of the inter-nucleoside linkers of the modified antisense oligonucleotide, or contiguous nucleotide sequence thereof, comprise a phosphorothioate inter-nucleoside linker.

[0026] Representative phosphorus containing internucleoside linkages further include, but are limited to, phosphodiesters, phosphotriesters, methylphosphonates, phosphoramidate, and phosphorothioates. Methods of preparation of phosphorous-containing and non-phosphorous-containing linkages are well known. Generally, the two main classes of internucleoside linking groups are defined by the presence or absence of a phosphorus atom. Representative phosphorus-containing internucleoside linkages include but are not limited to phosphates, which contain a phosphodiester bond (“P═O”) (also referred to as unmodified or naturally occurring linkages), phosphotriesters, methylphosphonates, phosphoramidates, and phosphorothioates (“P═S”), and phosphorodithioates (“HS—P═S”). Representative non-phosphorus containing internucleoside linking groups include but are not limited to methylenemethylimino (—CH2-N(CH3)-O—CH2-), thiodiester, thionocarbamate (—O—C(═O)(NH)—S—); siloxane (—O—SiH2-O—); and N,N′-dimethylhydrazine (—CH2-N(CH3)-N(CH3)-). Additional examples of inter-nucleoside linkages include, without limitation, phosphotriesters, methylphosphonates, MMI (31-CH2-N(CH3)-O-5′), amide-3 (31-CH2-C(═O)—N(H)-5′), amide-4 (31-CH2-N(H)—C(═O)-5′), formacetal (31-O—CH2-O-5), methoxypropyl, and thioformacetal (31-S-CH2-O-5′). Further inter-nucleoside linkages include nonionic linkages comprising siloxane (dialkylsiloxane), carboxylate ester, carboxamide, sulfide, sulfonate ester, and amides. Modified inter-nucleoside linkages, compared to naturally occurring phosphate linkages, can be used to alter, typically increase, nuclease resistance of the oligonucleotide.

[0027] In some embodiments, the modified antisense oligonucleotides (ASOs) comprise one or more modified inter-nucleoside linkers. In certain embodiments, the modified antisense oligonucleotides (ASOs) comprise 1 modified inter-nucleoside linker to 24 modified inter-nucleoside linkers. In certain embodiments, the modified antisense oligonucleotides (ASOs) comprise 1 modified inter-nucleoside linker to 2 modified inter-nucleoside linkers, 1 modified inter-nucleoside linker to 3 modified inter-nucleoside linkers, 1 modified inter-nucleoside linker to 4 modified inter-nucleoside linkers, 1 modified inter-nucleoside linker to 5 modified inter-nucleoside linkers, 1 modified inter-nucleoside linker to 10 modified inter-nucleoside linkers, 1 modified inter-nucleoside linker to 12 modified inter-nucleoside linkers, 1 modified inter-nucleoside linker to 15 modified inter-nucleoside linkers, 1 modified inter-nucleoside linker to 18 modified inter-nucleoside linkers, 1 modified inter-nucleoside linker to 20 modified inter-nucleoside linkers, 1 modified inter-nucleoside linker to 22 modified inter-nucleoside linkers, 1 modified inter-nucleoside linker to 24 modified inter-nucleoside linkers, 2 modified inter-nucleoside linkers to 3 modified inter-nucleoside linkers, 2 modified inter-nucleoside linkers to 4 modified inter-nucleoside linkers, 2 modified inter-nucleoside linkers to 5 modified inter-nucleoside linkers, 2 modified inter-nucleoside linkers to 10 modified inter-nucleoside linkers, 2 modified inter-nucleoside linkers to 12 modified inter-nucleoside linkers, 2 modified inter-nucleoside linkers to 15 modified inter-nucleoside linkers, 2 modified inter-nucleoside linkers to 18 modified inter-nucleoside linkers, 2 modified inter-nucleoside linkers to 20 modified inter-nucleoside linkers, 2 modified inter-nucleoside linkers to 22 modified inter-nucleoside linkers, 2 modified inter-nucleoside linkers to 24 modified inter-nucleoside linkers, 3 modified inter-nucleoside linkers to 4 modified inter-nucleoside linkers, 3 modified inter-nucleoside linkers to 5 modified inter-nucleoside linkers, 3 modified inter-nucleoside linkers to 10 modified inter-nucleoside linkers, 3 modified inter-nucleoside linkers to 12 modified inter-nucleoside linkers, 3 modified inter-nucleoside linkers to 15 modified inter-nucleoside linkers, 3 modified inter-nucleoside linkers to 18 modified inter-nucleoside linkers, 3 modified inter-nucleoside linkers to 20 modified inter-nucleoside linkers, 3 modified inter-nucleoside linkers to 22 modified inter-nucleoside linkers, 3 modified inter-nucleoside linkers to 24 modified inter-nucleoside linkers, 4 modified inter-nucleoside linkers to 5 modified inter-nucleoside linkers, 4 modified inter-nucleoside linkers to 10 modified inter-nucleoside linkers, 4 modified inter-nucleoside linkers to 12 modified inter-nucleoside linkers, 4 modified inter-nucleoside linkers to 15 modified inter-nucleoside linkers, 4 modified inter-nucleoside linkers to 18 modified inter-nucleoside linkers, 4 modified inter-nucleoside linkers to 20 modified inter-nucleoside linkers, 4 modified inter-nucleoside linkers to 22 modified inter-nucleoside linkers, 4 modified inter-nucleoside linkers to 24 modified inter-nucleoside linkers, 5 modified inter-nucleoside linkers to 10 modified inter-nucleoside linkers, 5 modified inter-nucleoside linkers to 12 modified inter-nucleoside linkers, 5 modified inter-nucleoside linkers to 15 modified inter-nucleoside linkers, 5 modified inter-nucleoside linkers to 18 modified inter-nucleoside linkers, 5 modified inter-nucleoside linkers to 20 modified inter-nucleoside linkers, 5 modified inter-nucleoside linkers to 22 modified inter-nucleoside linkers, 5 modified inter-nucleoside linkers to 24 modified inter-nucleoside linkers, 10 modified inter-nucleoside linkers to 12 modified inter-nucleoside linkers, 10 modified inter-nucleoside linkers to 15 modified inter-nucleoside linkers, 10 modified inter-nucleoside linkers to 18 modified inter-nucleoside linkers, 10 modified inter-nucleoside linkers to 20 modified inter-nucleoside linkers, 10 modified inter-nucleoside linkers to 22 modified inter-nucleoside linkers, 10 modified inter-nucleoside linkers to 24 modified inter-nucleoside linkers, 12 modified inter-nucleoside linkers to 15 modified inter-nucleoside linkers, 12 modified inter-nucleoside linkers to 18 modified inter-nucleoside linkers, 12 modified inter-nucleoside linkers to 20 modified inter-nucleoside linkers, 12 modified inter-nucleoside linkers to 22 modified inter-nucleoside linkers, 12 modified inter-nucleoside linkers to 24 modified inter-nucleoside linkers, 15 modified inter-nucleoside linkers to 18 modified inter-nucleoside linkers, 15 modified inter-nucleoside linkers to 20 modified inter-nucleoside linkers, 15 modified inter-nucleoside linkers to 22 modified inter-nucleoside linkers, 15 modified inter-nucleoside linkers to 24 modified inter-nucleoside linkers, 18 modified inter-nucleoside linkers to 20 modified inter-nucleoside linkers, 18 modified inter-nucleoside linkers to 22 modified inter-nucleoside linkers, 18 modified inter-nucleoside linkers to 24 modified inter-nucleoside linkers, 20 modified inter-nucleoside linkers to 22 modified inter-nucleoside linkers, 20 modified inter-nucleoside linkers to 24 modified inter-nucleoside linkers, or 22 modified inter-nucleoside linkers to 24 modified inter-nucleoside linkers. In certain embodiments, the modified antisense oligonucleotides (ASOs) comprise 1 modified inter-nucleoside linker, 2 modified inter-nucleoside linkers, 3 modified inter-nucleoside linkers, 4 modified inter-nucleoside linkers, 5 modified inter-nucleoside linkers, 10 modified inter-nucleoside linkers, 12 modified inter-nucleoside linkers, 15 modified inter-nucleoside linkers, 18 modified inter-nucleoside linkers, 20 modified inter-nucleoside linkers, 22 modified inter-nucleoside linkers, or 24 modified inter-nucleoside linkers. In certain embodiments, the modified antisense oligonucleotides (ASOs) comprise at least 1 modified inter-nucleoside linker, 2 modified inter-nucleoside linkers, 3 modified inter-nucleoside linkers, 4 modified inter-nucleoside linkers, 5 modified inter-nucleoside linkers, 10 modified inter-nucleoside linkers, 12 modified inter-nucleoside linkers, 15 modified inter-nucleoside linkers, 18 modified inter-nucleoside linkers, 20 modified inter-nucleoside linkers, or 22 modified inter-nucleoside linkers. In certain embodiments, the modified antisense oligonucleotides (ASOs) comprise at most 2 modified inter-nucleoside linkers, 3 modified inter-nucleoside linkers, 4 modified inter-nucleoside linkers, 5 modified inter-nucleoside linkers, 10 modified inter-nucleoside linkers, 12 modified inter-nucleoside linkers, 15 modified inter-nucleoside linkers, 18 modified inter-nucleoside linkers, 20 modified inter-nucleoside linkers, 22 modified inter-nucleoside linkers, or 24 modified inter-nucleoside linkers.

[0028] FIG. 2 demonstrates exemplary nucleotide positions (circles) that can comprise the modified inter-nucleoside linker(s). In certain embodiments, the modified antisense oligonucleotides (ASOs) comprise at least 10% modified inter-nucleoside linkers (e.g., 90% of inter-nucleoside linkers are PO phosphate bonds) to at least 100% modified inter-nucleoside linkers. In certain embodiments, the modified antisense oligonucleotides (ASOs) comprise 10% modified inter-nucleoside linkers to 20% modified inter-nucleoside linkers, 10% modified inter-nucleoside linkers to 30% modified inter-nucleoside linkers, 10% modified inter-nucleoside linkers to 40% modified inter-nucleoside linkers, 10% modified inter-nucleoside linkers to 50% modified inter-nucleoside linkers, 10% modified inter-nucleoside linkers to 60% modified inter-nucleoside linkers, 10% modified inter-nucleoside linkers to 70% modified inter-nucleoside linkers, 10% modified inter-nucleoside linkers to 80% modified inter-nucleoside linkers, 10% modified inter-nucleoside linkers to 90% modified inter-nucleoside linkers, 10% modified inter-nucleoside linkers to 100% modified inter-nucleoside linkers, 20% modified inter-nucleoside linkers to 30% modified inter-nucleoside linkers, 20% modified inter-nucleoside linkers to 40% modified inter-nucleoside linkers, 20% modified inter-nucleoside linkers to 50% modified inter-nucleoside linkers, 20% modified inter-nucleoside linkers to 60% modified inter-nucleoside linkers, 20% modified inter-nucleoside linkers to 70% modified inter-nucleoside linkers, 20% modified inter-nucleoside linkers to 80% modified inter-nucleoside linkers, 20% modified inter-nucleoside linkers to 90% modified inter-nucleoside linkers, 20% modified inter-nucleoside linkers to 100% modified inter-nucleoside linkers, 30% modified inter-nucleoside linkers to 40% modified inter-nucleoside linkers, 30% modified inter-nucleoside linkers to 50% modified inter-nucleoside linkers, 30% modified inter-nucleoside linkers to 60% modified inter-nucleoside linkers, 30% modified inter-nucleoside linkers to 70% modified inter-nucleoside linkers, 30% modified inter-nucleoside linkers to 80% modified inter-nucleoside linkers, 30% modified inter-nucleoside linkers to 90% modified inter-nucleoside linkers, 30% modified inter-nucleoside linkers to 100% modified inter-nucleoside linkers, 40% modified inter-nucleoside linkers to 50% modified inter-nucleoside linkers, 40% modified inter-nucleoside linkers to 60% modified inter-nucleoside linkers, 40% modified inter-nucleoside linkers to 70% modified inter-nucleoside linkers, 40% modified inter-nucleoside linkers to 80% modified inter-nucleoside linkers, 40% modified inter-nucleoside linkers to 90% modified inter-nucleoside linkers, 40% modified inter-nucleoside linkers to 100% modified inter-nucleoside linkers, 50% modified inter-nucleoside linkers to 60% modified inter-nucleoside linkers, 50% modified inter-nucleoside linkers to 70% modified inter-nucleoside linkers, 50% modified inter-nucleoside linkers to 80% modified inter-nucleoside linkers, 50% modified inter-nucleoside linkers to 90% modified inter-nucleoside linkers, 50% modified inter-nucleoside linkers to 100% modified inter-nucleoside linkers, 60% modified inter-nucleoside linkers to 70% modified inter-nucleoside linkers, 60% modified inter-nucleoside linkers to 80% modified inter-nucleoside linkers, 60% modified inter-nucleoside linkers to 90% modified inter-nucleoside linkers, 60% modified inter-nucleoside linkers to 100% modified inter-nucleoside linkers, 70% modified inter-nucleoside linkers to 80% modified inter-nucleoside linkers, 70% modified inter-nucleoside linkers to 90% modified inter-nucleoside linkers, 70% modified inter-nucleoside linkers to 100% modified inter-nucleoside linkers, 80% modified inter-nucleoside linkers to 90% modified inter-nucleoside linkers, 80% modified inter-nucleoside linkers to 100% modified inter-nucleoside linkers, or 90% modified inter-nucleoside linkers to 100% modified inter-nucleoside linkers. In certain embodiments, the modified antisense oligonucleotides (ASOs) comprise 10% modified inter-nucleoside linkers, 20% modified inter-nucleoside linkers, 30% modified inter-nucleoside linkers, 40% modified inter-nucleoside linkers, 50% modified inter-nucleoside linkers, 60% modified inter-nucleoside linkers, 70% modified inter-nucleoside linkers, 80% modified inter-nucleoside linkers, 90% modified inter-nucleoside linkers, or 100% modified inter-nucleoside linkers. In certain embodiments, the modified antisense oligonucleotides (ASOs) comprise at least 10% modified inter-nucleoside linkers, 20% modified inter-nucleoside linkers, 30% modified inter-nucleoside linkers, 40% modified inter-nucleoside linkers, 50% modified inter-nucleoside linkers, 60% modified inter-nucleoside linkers, 70% modified inter-nucleoside linkers, 80% modified inter-nucleoside linkers, or 90% modified inter-nucleoside linkers. In certain embodiments, the modified antisense oligonucleotides (ASOs) comprise at most 20% modified inter-nucleoside linkers, 30% modified inter-nucleoside linkers, 40% modified inter-nucleoside linkers, 50% modified inter-nucleoside linkers, 60% modified inter-nucleoside linkers, 70% modified inter-nucleoside linkers, 80% modified inter-nucleoside linkers, 90% modified inter-nucleoside linkers, or 100% modified inter-nucleoside linkers.

[0029] The modified inter-nucleoside linkers described herein can be employed across modified antisense oligonucleotides (ASOs) of the varying lengths described herein (e.g., 17-23 mers) and/or in combination with any number of modified nucleosides described herein.

### Modified Nucleosides

[0030] Modifications to the ribose sugar or nucleobase can also be utilized to increase pharmacodynamic, pharmacokinetic, and biodistribution properties. Similar to modifications of the inter-nucleoside linker, nucleoside modifications prevent or reduce degradation by cellular nucleases, thus increasing the pharmacokinetics and bioavailability of the modified antisense oligonucleotide. Generally, a modified nucleoside includes the introduction of one or more modifications of the sugar moiety or the nucleobase moiety.

[0031] The modified antisense oligonucleotides, as described, can comprise one or more nucleosides comprising a modified sugar moiety, wherein the modified sugar moiety is a modification of the sugar moiety when compared to the ribose sugar moiety found in deoxyribose nucleic acid (DNA) and RNA. Numerous nucleosides with modification of the ribose sugar moiety can be utilized, primarily with the aim of improving certain properties of oligonucleotides, such as affinity and/or nuclease resistance. Such modifications include those where the ribose ring structure is modified. These modifications include replacement with a hexose ring (HNA), a bicyclic ring having a biradicle bridge between the C2 and C4 carbons on the ribose ring (e.g., locked nucleic acids (LNA)), or an unlinked ribose ring which typically lacks a bond between the C2 and C3 carbons (e.g., UNA). Other sugar modified nucleosides include, for example, bicyclohexose nucleic acids or tricyclic nucleic acids. Modified nucleosides also include nucleosides where the sugar moiety is replaced with a non-sugar moiety, for example in the case of peptide nucleic acids (PNA), or morpholino nucleic acids. In some embodiments, the modified sugar is a bicyclic sugar. Further nucleoside modifications are described in U.S. Pat. No. 11,241,451, which can be further employed as described herein.

[0032] Sugar modifications also include modifications made by altering the substituent groups on the ribose ring to groups other than hydrogen, or the 2′-OH group naturally found in DNA and RNA nucleosides. Substituents may, for example be introduced at the 2′, 3′, 4′ or 5′ positions. Nucleosides with modified sugar moieties also include 2′ modified nucleosides, such as 2′ substituted nucleosides. Indeed, much focus has been spent on developing 2′ substituted nucleosides, and numerous 2′ substituted nucleosides have been found to have beneficial properties when incorporated into oligonucleotides, such as enhanced nucleoside resistance and enhanced affinity. A 2′ sugar modified nucleoside is a nucleoside that has a substituent other than H or —OH at the 2′ position (2′ substituted nucleoside) or comprises a 2′ linked biradicle, and includes 2′ substituted nucleosides and LNA (2′-4′ biradicle bridged) nucleosides. Examples of 2′ substituted modified nucleosides are 2′-O-alkyl, 2′-O-methyl (2′-OMe), 2′-alkoxy, 2′-O-methoxyethyl-oligos (MOE), 2′-amino, 2′-Fluoro, and 2′-F-ANA nucleoside. The 2′ substituted modified nucleosides can be DNA or RNA. In some embodiments, the modified sugar comprises a 2′-O-methoxyethyl (MOE) group. In some embodiments, the modified sugar comprises a 2′-O-alkyl group. In some embodiments, the modified sugar comprises a 2′-O-methyl (2′-OMe) group. In some embodiments, the modified sugar comprises a 2′-alkoxy group. In some embodiments, the modified sugar comprises a 2′-O-methoxyethyl-oligos (MOE) group. In some embodiments, the modified sugar comprises a 2′-amino group. In some embodiments, the modified sugar comprises a 2′-Fluoro group. In some embodiments, the modified sugar comprises a 2′-F-ANA group.

[0033] In certain additional embodiments, 2′-substituent groups are selected from among: halo, allyl, amino, azido, SH, CN, OCN, CF3, OCF3, O—C1-Cm alkoxy, O—C1-C10 substituted alkoxy, O—C1-Cm alkyl, O—C1-C10 substituted alkyl, 5-alkyl, N(Rm) alkyl, O-alkenyl, S-alkenyl, N(Rm)-alkenyl, O-alkynyl, 5-alkynyl, N(Rm) alkynyl, O-alkylenyl-O-alkyl, alkynyl, alkaryl, aralkyl, O-alkaryl, O-aralkyl, O(CH2)25CH3, O(CH2)2ON(Rm)(R.) or OCH2C(═O)—N(Rm)(R.), where each Rm and R. is, independently, H, an amino protecting group, or substituted or unsubstituted C1-C10 alkyl groups. Certain embodiments of such 2′-substituent groups can be further substituted with one or more substituent groups independently selected from among: hydroxyl, amino, alkoxy, carboxy, benzyl, phenyl, nitro (NO2), thiol, thioalkoxy, thioalkyl, halogen, alkyl, aryl, alkenyl and alkynyl

[0034] In some embodiments, the modified antisense oligonucleotide comprises one or more modified sugars. In some embodiments, the modified antisense oligonucleotide comprises only modified sugars. In certain embodiments, the modified antisense oligo comprises greater than 10%, 25%, 50%, 75%, or 90% modified nucleosides.

[0035] FIG. 3 demonstrates exemplary nucleotide positions (circles) that can comprise the modified nucleoside(s). In certain embodiments, the modified antisense oligonucleotides (ASOs) comprise 10% modified nucleosides to 100% modified nucleosides. In certain embodiments, the modified antisense oligonucleotides (ASOs) comprise 10% modified nucleosides to 20% modified nucleosides, 10% modified nucleosides to 30% modified nucleosides, 10% modified nucleosides to 40% modified nucleosides, 10% modified nucleosides to 50% modified nucleosides, 10% modified nucleosides to 60% modified nucleosides, 10% modified nucleosides to 70% modified nucleosides, 10% modified nucleosides to 80% modified nucleosides, 10% modified nucleosides to 90% modified nucleosides, 10% modified nucleosides to 100% modified nucleosides, 20% modified nucleosides to 30% modified nucleosides, 20% modified nucleosides to 40% modified nucleosides, 20% modified nucleosides to 50% modified nucleosides, 20% modified nucleosides to 60% modified nucleosides, 20% modified nucleosides to 70% modified nucleosides, 20% modified nucleosides to 80% modified nucleosides, 20% modified nucleosides to 90% modified nucleosides, 20% modified nucleosides to 100% modified nucleosides, 30% modified nucleosides to 40% modified nucleosides, 30% modified nucleosides to 50% modified nucleosides, 30% modified nucleosides to 60% modified nucleosides, 30% modified nucleosides to 70% modified nucleosides, 30% modified nucleosides to 80% modified nucleosides, 30% modified nucleosides to 90% modified nucleosides, 30% modified nucleosides to 100% modified nucleosides, 40% modified nucleosides to 50% modified nucleosides, 40% modified nucleosides to 60% modified nucleosides, 40% modified nucleosides to 70% modified nucleosides, 40% modified nucleosides to 80% modified nucleosides, 40% modified nucleosides to 90% modified nucleosides, 40% modified nucleosides to 100% modified nucleosides, 50% modified nucleosides to 60% modified nucleosides, 50% modified nucleosides to 70% modified nucleosides, 50% modified nucleosides to 80% modified nucleosides, 50% modified nucleosides to 90% modified nucleosides, 50% modified nucleosides to 100% modified nucleosides, 60% modified nucleosides to 70% modified nucleosides, 60% modified nucleosides to 80% modified nucleosides, 60% modified nucleosides to 90% modified nucleosides, 60% modified nucleosides to 100% modified nucleosides, 70% modified nucleosides to 80% modified nucleosides, 70% modified nucleosides to 90% modified nucleosides, 70% modified nucleosides to 100% modified nucleosides, 80% modified nucleosides to 90% modified nucleosides, 80% modified nucleosides to 100% modified nucleosides, or 90% modified nucleosides to 100% modified nucleosides. In certain embodiments, the modified antisense oligonucleotides (ASOs) comprise 10% modified nucleosides, 20% modified nucleosides, 30% modified nucleosides, 40% modified nucleosides, 50% modified nucleosides, 60% modified nucleosides, 70% modified nucleosides, 80% modified nucleosides, 90% modified nucleosides, or 100% modified nucleosides. In certain embodiments, the modified antisense oligonucleotides (ASOs) comprise at least 10% modified nucleosides, 20% modified nucleosides, 30% modified nucleosides, 40% modified nucleosides, 50% modified nucleosides, 60% modified nucleosides, 70% modified nucleosides, 80% modified nucleosides, or 90% modified nucleosides. In certain embodiments, the modified antisense oligonucleotides (ASOs) comprise at most 20% modified nucleosides, 30% modified nucleosides, 40% modified nucleosides, 50% modified nucleosides, 60% modified nucleosides, 70% modified nucleosides, 80% modified nucleosides, 90% modified nucleosides, or 100% modified nucleosides.

[0036] In certain embodiments, the modified antisense oligonucleotides (ASOs) comprise 1 modified nucleoside to 23 modified nucleosides. In certain embodiments, the modified antisense oligonucleotides (ASOs) comprise 1 modified nucleoside to 2 modified nucleosides, 1 modified nucleoside to 3 modified nucleosides, 1 modified nucleoside to 4 modified nucleosides, 1 modified nucleoside to 5 modified nucleosides, 1 modified nucleoside to 10 modified nucleosides, 1 modified nucleoside to 12 modified nucleosides, 1 modified nucleoside to 15 modified nucleosides, 1 modified nucleoside to 18 modified nucleosides, 1 modified nucleoside to 20 modified nucleosides, 1 modified nucleoside to 22 modified nucleosides, 1 modified nucleoside to 23 modified nucleosides, 2 modified nucleosides to 3 modified nucleosides, 2 modified nucleosides to 4 modified nucleosides, 2 modified nucleosides to 5 modified nucleosides, 2 modified nucleosides to 10 modified nucleosides, 2 modified nucleosides to 12 modified nucleosides, 2 modified nucleosides to 15 modified nucleosides, 2 modified nucleosides to 18 modified nucleosides, 2 modified nucleosides to 20 modified nucleosides, 2 modified nucleosides to 22 modified nucleosides, 2 modified nucleosides to 23 modified nucleosides, 3 modified nucleosides to 4 modified nucleosides, 3 modified nucleosides to 5 modified nucleosides, 3 modified nucleosides to 10 modified nucleosides, 3 modified nucleosides to 12 modified nucleosides, 3 modified nucleosides to 15 modified nucleosides, 3 modified nucleosides to 18 modified nucleosides, 3 modified nucleosides to 20 modified nucleosides, 3 modified nucleosides to 22 modified nucleosides, 3 modified nucleosides to 23 modified nucleosides, 4 modified nucleosides to 5 modified nucleosides, 4 modified nucleosides to 10 modified nucleosides, 4 modified nucleosides to 12 modified nucleosides, 4 modified nucleosides to 15 modified nucleosides, 4 modified nucleosides to 18 modified nucleosides, 4 modified nucleosides to 20 modified nucleosides, 4 modified nucleosides to 22 modified nucleosides, 4 modified nucleosides to 23 modified nucleosides, 5 modified nucleosides to 10 modified nucleosides, 5 modified nucleosides to 12 modified nucleosides, 5 modified nucleosides to 15 modified nucleosides, 5 modified nucleosides to 18 modified nucleosides, 5 modified nucleosides to 20 modified nucleosides, 5 modified nucleosides to 22 modified nucleosides, 5 modified nucleosides to 23 modified nucleosides, 10 modified nucleosides to 12 modified nucleosides, 10 modified nucleosides to 15 modified nucleosides, 10 modified nucleosides to 18 modified nucleosides, 10 modified nucleosides to 20 modified nucleosides, 10 modified nucleosides to 22 modified nucleosides, 10 modified nucleosides to 23 modified nucleosides, 12 modified nucleosides to 15 modified nucleosides, 12 modified nucleosides to 18 modified nucleosides, 12 modified nucleosides to 20 modified nucleosides, 12 modified nucleosides to 22 modified nucleosides, 12 modified nucleosides to 23 modified nucleosides, 15 modified nucleosides to 18 modified nucleosides, 15 modified nucleosides to 20 modified nucleosides, 15 modified nucleosides to 22 modified nucleosides, 15 modified nucleosides to 23 modified nucleosides, 18 modified nucleosides to 20 modified nucleosides, 18 modified nucleosides to 22 modified nucleosides, 18 modified nucleosides to 23 modified nucleosides, 20 modified nucleosides to 22 modified nucleosides, 20 modified nucleosides to 23 modified nucleosides, or 22 modified nucleosides to 23 modified nucleosides. In certain embodiments, the modified antisense oligonucleotides (ASOs) comprise 1 modified nucleoside, 2 modified nucleosides, 3 modified nucleosides, 4 modified nucleosides, 5 modified nucleosides, 10 modified nucleosides, 12 modified nucleosides, 15 modified nucleosides, 18 modified nucleosides, 20 modified nucleosides, 22 modified nucleosides, or 23 modified nucleosides. In certain embodiments, the modified antisense oligonucleotides (ASOs) comprise at least 1 modified nucleoside, 2 modified nucleosides, 3 modified nucleosides, 4 modified nucleosides, 5 modified nucleosides, 10 modified nucleosides, 12 modified nucleosides, 15 modified nucleosides, 18 modified nucleosides, 20 modified nucleosides, or 22 modified nucleosides. In certain embodiments, the modified antisense oligonucleotides (ASOs) comprise at most 2 modified nucleosides, 3 modified nucleosides, 4 modified nucleosides, 5 modified nucleosides, 10 modified nucleosides, 12 modified nucleosides, 15 modified nucleosides, 18 modified nucleosides, 20 modified nucleosides, 22 modified nucleosides, or 23 modified nucleosides.

[0037] In some embodiments, the modified antisense oligonucleotide comprises both inter-nucleoside linker modifications and nucleoside modifications.

### Pharmaceutical Compositions

[0038] Further provided herein are pharmaceutical compositions comprising any of the disclosed antisense oligonucleotides and a pharmaceutically acceptable diluent, carrier, salt and/or adjuvant. A pharmaceutically acceptable diluent includes phosphate-buffered saline (PBS) and pharmaceutically acceptable salts include, but are not limited to, sodium and potassium salts. In some embodiments the pharmaceutically acceptable diluent is sterile phosphate buffered saline. In some embodiments, the oligonucleotide is used in the pharmaceutically acceptable diluent at a concentration of 50-300 UM solution. In some embodiments, the oligonucleotide, as described, is administered at a dose of 10-1000 ug.

[0039] The modified antisense oligonucleotides or oligonucleotide conjugates of the disclosure may be mixed with pharmaceutically acceptable active or inert substances for the preparation of pharmaceutical compositions or formulations. Compositions and methods for the formulation of pharmaceutical compositions are dependent upon a number of criteria, including, but not limited to, route of administration, the extent of disease, or dose to be administered.

### Methods of Use

[0040] The modified antisense oligonucleotides (ASOs) provided herein are useful for targeting a FOXG1 nucleic acid encoding a functional FOXG1 protein, wherein an antisense oligonucleotide inhibits translation inhibition, interferes with upstream open reading frames (uORFs), inhibits RNA degradation, and/or increases RNA stability to ultimately increase protein expression of a functional FOXG1 protein. According, the modified antisense oligonucleotides targeting are further useful in methods for increasing the expression and/or amount of functional FOXG1 in a cell (e.g., an amount of functional FOXG1 mRNA or protein). Accordingly, provided herein are methods of modulating expression of a FOXG1 in a cell, comprising contacting the cell with a composition comprising an antisense oligonucleotide complementary to a target nucleic acid sequence of a FOXG1 nucleic acid.

[0041] Further provided, are methods of treating or ameliorating a FOXG1 disease or disorder in an individual having, or at risk of having, the FOXG1 disease or disorder, comprising administering to the individual an antisense oligonucleotide, wherein the modified antisense oligonucleotide comprises a sequence complementary to a target sequence of the FOXG1 nucleic acid, thereby treating or ameliorating a FOXG1 disease in the individual.

[0042] Generally, cells of interest include neuronal cells and/or cells associated with the brain or brain development. In some embodiments, the cell is located in a brain of an individual. In some embodiments, the cell is a neural cell. In some embodiments, the individual is a human. In certain embodiments, the human is an unborn human.

[0043] The modified antisense oligonucleotides (ASOs) and methods are particularly useful for increasing the expression and/or amount of functional FOXG1 (e.g., an amount of functional FOXG1 mRNA or protein) in a cell and/or individual comprising a mutated or deleted FOXG1 allele. In some embodiments, the cell and/or individual comprises a mutated FOXG1 gene. In some embodiments the individual has been diagnosed with or at risk of a FOXG1 disease or disorder. In some embodiments, the FOXG1 disease o disorder is FOXG1 syndrome.

[0044] In some embodiments, modulating expression comprises increasing expression of a FOXG1 protein in the cell. In some embodiments, modulating expression comprises increasing stability or half-life of the FOXG1 nucleic acid in the cell. In some embodiments, modulating expression comprises increasing translation of a FOXG1 protein in the cell.

[0045] In order to achieve effective targeting of a FOXG1 RNA (e.g., messenger RNA), the modified antisense oligonucleotides disclosed herein (ASOs) comprise a sequence complementary to a sequence of the FOXG1 RNA, wherein the complementary sequence binds and/or hybridizes to a sequence of the FOXG1 RNA. For example, mRNA transcripts comprise a 5′ untranslated region (5′ UTR) and a 3′ untranslated region (3′ UTR). The modified antisense oligonucleotides (ASOs) disclosed herein target the 5′ UTR or the 3′ UTR of a FOXG1 mRNA transcript. In order to achieve targeting of the 5′ UTR or 3′ UTR, the modified antisense oligonucleotide (ASOs) comprise a sequence complementary to a target sequence is located at the 5′ UTR or the 3′ UTR of the FOXG1 mRNA. In some embodiments, the target sequence is located at or within the 5′ UTR. In some embodiments, the target sequence is located at or within the 3′ UTR. In certain embodiments, the modified antisense oligonucleotide targeting the 3′ UTR comprises a nucleobase sequence complementary to a sequence within NM_005249.5_2000-2200_as region or NM_005249.5_2900-3000_as of the FOXG1 nucleic acid. In certain embodiments, the modified antisense oligonucleotide targeting the 3′ UTR comprises a nucleobase sequence complementary to a sequence within NM_005249.5_2000-2100_as region of the FOXG1 nucleic acid. In some embodiments, the modified antisense oligonucleotides are included in an ASO composition comprising more than one ASO. In certain the embodiments, the ASO composition comprises 2, 3, 4, 5 or more ASOs.

[0046] Formulations of therapeutic and diagnostic agents can be prepared by mixing with physiologically acceptable carriers, excipients, or stabilizers in the form of, e.g., lyophilized powders, slurries, aqueous solutions, lotions, or suspensions (see, e.g., Hardman et al., Goodman and Gilman's The Pharmacological Basis of Therapeutics, McGraw-Hill, New York, N.Y., 2001; Gennaro, Remington: The Science and Practice of Pharmacy, Lippincott, Williams, and Wilkins, New York, N.Y., 2000; Avis, et al. (eds.), Pharmaceutical Dosage Forms: Parenteral Medications, Marcel Dekker, NY, 1993; Lieberman, et al. (eds.), Pharmaceutical Dosage Forms: Tablets, Marcel Dekker, NY, 1990; Lieberman, et al. (eds.) Pharmaceutical Dosage Forms: Disperse Systems, Inc., New York, N.Y., 2000).

[0047] Compositions comprising antisense oligonucleotides (ASOs), as disclosed herein, can be provided by doses at intervals of, e.g., one day, one week, or 1-7 times per week. A specific dose protocol is one involving the maximal dose or dose frequency that avoids significant undesirable side effects.

[0048] The disclosed antisense oligonucleotides or pharmaceutical compositions thereof can be administered topically (such as, to the skin, inhalation, ophthalmic or otic) or enterally (such as, orally or through the gastrointestinal tract) or parenterally (such as, intravenous, subcutaneous, intra-muscular, intracerebral, intracerebroventricular or intrathecal). In some embodiments, the modified antisense oligonucleotide or pharmaceutical compositions thereof are administered by a parenteral route including intravenous, intraarterial, subcutaneous, intraperitoneal or intramuscular injection or infusion, intrathecal or intracranial, e.g., intracerebral or intraventricular, administration. In some embodiments, the active oligonucleotide or oligonucleotide conjugate is administered intravenously.

### Definitions

[0049] Unless defined otherwise, all terms of art, notations and other technical and scientific terms or terminology used herein are intended to have the same meaning as is commonly understood by one of ordinary skill in the art to which the claimed subject matter pertains. In some cases, terms with commonly understood meanings are defined herein for clarity and/or for ready reference, and the inclusion of such definitions herein should not necessarily be construed to represent a substantial difference over what is generally understood in the art.

[0050] The term “FOXG1,” as used herein, generally refers to the gene and gene products that encode a member of the fork-head transcription factor family. The encoded protein, which functions as a transcriptional repressor, is highly expressed in neural tissues during brain development. Mutations at this locus have been associated with Rett syndrome and a diverse spectrum of neurodevelopmental disorders defined as part of FOXG1 syndrome. Depending on the context of its use, “FOXG1” can refer to the FOXG1 gene, a FOXG1 deoxyribonucleic acid molecule (DNA), a FOXG1 ribonucleic acid molecule (RNA), or a FOXG1 protein. The mRNA sequence of FOXG1 is described in “NM_005249.5→NP_005240.3 forkhead box protein G1” or “accession number NM_005249.5” or the mRNA encoded by “NCBI GENE ID: 2290”. A functional FOXG1 protein describes the wild-type or unmutated FOXG1 gene, mRNA, and/or protein. Generally, “FOXG1” refers to a functional ‘FOXG1” gene or gene product, having normal function/activity within a cell. Deletions or mutations or variants of FOXG1 are indicative of non-functional FOXG1 variants having reduced, inhibited, or ablated FOXG1 function. As disclosed herein, the compositions and methods disclosed herein are primarily concerned with modulating or increasing or restoring an amount of FOXG1 (i.e., functional FOXG1) in a cell and/or individual.

[0051] The term “oligonucleotide,” as used herein, generally refers to a molecule comprising two or more covalently linked nucleosides. Such covalently bound nucleosides may also be referred to as nucleic acid molecules or oligomers. Oligonucleotides are commonly made in the laboratory by solid-phase chemical synthesis followed by purification. When referring to a sequence of the oligonucleotide, reference is made to the sequence or order of nucleobase moieties, or modifications thereof, of the covalently linked nucleotides or nucleosides. The oligonucleotide of the disclosure is man-made, and is chemically synthesized, and is typically purified or isolated. The oligonucleotide disclosed may comprise one or more modified nucleosides or nucleotides.

[0052] The term “antisense oligonucleotide,” as used herein, refers to oligonucleotides capable of modulating expression of a target gene by hybridizing to a target nucleic acid, in particular to a contiguous sequence on a target nucleic acid. Preferably, the modified antisense oligonucleotides of the present disclosure are single stranded. In some embodiments, the modified antisense oligonucleotide is single stranded.

[0053] The term “modified oligonucleotide” refers to an oligonucleotide comprising one or more sugar-modified nucleosides, modified nucleobases, and/or modified inter-nucleoside linkers.

[0054] The term “modified nucleoside” or “nucleoside modification,” as used herein, refers to nucleosides modified as compared to the equivalent DNA or RNA nucleoside by the introduction of one or more modifications of the sugar moiety or the (nucleo) base moiety. In some embodiments, the modified nucleoside comprise a modified sugar moiety. The term modified nucleoside may also be used herein interchangeably with the term “nucleoside analogue” or modified “units” or modified “monomers”.

[0055] The term “modified inter-nucleoside linkage” is refers to linkers other than phosphodiester (PO) linkers, that covalently couples two nucleosides together. Nucleotides with modified inter-nucleoside linkage are also termed “modified nucleotides”. In some embodiments, the modified inter-nucleoside linkage increases the nuclease resistance of the oligonucleotide compared to a phosphodiester linkage. For naturally occurring oligonucleotides, the inter-nucleoside linkage includes phosphate groups creating a phosphodiester bond between adjacent nucleosides. Modified inter-nucleoside linkers are particularly useful in stabilizing oligonucleotides for in vivo use and may serve to protect against nuclease cleavage at regions of DNA or RNA nucleosides.

[0056] The term “nucleobase” includes the purine (e.g., adenine and guanine) and pyrimidine (e.g., uracil, thymine and cytosine) moiety present in nucleosides and nucleotides which form hydrogen bonds in nucleic acid hybridization. The term nucleobase also encompasses modified nucleobases which may differ from naturally occurring nucleobases but are functional during nucleic acid hybridization. In this context “nucleobase” refers to both naturally occurring nucleobases such as adenine, guanine, cytosine, thymidine, uracil, xanthine and hypoxanthine, as well as non-naturally occurring variants.

[0057] A nucleobase moiety can be modified by changing the purine or pyrimidine into a modified purine or pyrimidine, such as substituted purine or substituted pyrimidine, such as a nucleobase selected from isocytosine, pseudoisocytosine, 5-methyl cytosine, 5-thiozolo-cytosine, 5-propynyl-cytosine, 5-propynyl-uracil, 5-bromouracil 5-thiazolo-uracil, 2-thio-uracil, 2′thio-thymine, inosine, diaminopurine, 6-aminopurine, 2-aminopurine, 2,6-diaminopurine and 2-chloro-6-aminopurine.

[0058] The nucleobase moieties may be indicated by the letter code for each corresponding nucleobase, e.g., A, T, G, C or U, wherein each letter may optionally include modified nucleobases of equivalent function. For example, in the exemplified oligonucleotides, the nucleobase moieties are selected from A, T, G, C, and 5-methyl cytosine. In some embodiments, the cytosine nucleobases in a 5′cg3′ motif is 5-methyl cytosine.

[0059] The term “hybridizing” or “hybridizes” or “targets” or “binds” describes two nucleic acid strands (e.g., an oligonucleotide and a target nucleic acid) forming hydrogen bonds between base pairs on opposite strands thereby forming a duplex. The affinity of the binding between two nucleic acid strands is the strength of the hybridization. It is often described in terms of the melting temperature (Tm) defined as the temperature at which half of the oligonucleotides are duplexed with the target nucleic acid.

[0060] The oligonucleotide comprises a contiguous nucleotide region which is complementary to or hybridizes to a sub-sequence or region of the target nucleic acid molecule. The term “target sequence” as used herein refers to a sequence of nucleotides present in the target nucleic acid which comprises the nucleobase sequence which is complementary to the contiguous nucleotide region or sequence of the oligonucleotide of the disclosure. In some embodiments, the target sequence consists of a region on the target nucleic acid which is complementary to the contiguous nucleotide region or sequence of the oligonucleotide of the present disclosure. In some embodiments the target sequence is longer than the complementary sequence of a single oligonucleotide, and may, for example represent a preferred region of the target nucleic acid which may be targeted by several oligonucleotides of the present disclosure.

[0061] The oligonucleotide of the present disclosure comprises a contiguous nucleotide region which is complementary to a FOXG1 target nucleic acid, such as a target sequence of FOXG1.

[0062] The oligonucleotide comprises a contiguous nucleotide region of at least 10 nucleotides which is complementary to or hybridizes to a target sequence present in the target nucleic acid molecule. The contiguous nucleotide region (and therefore the target sequence) comprises of at least 10 contiguous nucleotides, such as 11, 12, 13, 14, 15, 16, 17, 18, 19, 20, 21, 22, 23, 24, 25, 30 contiguous nucleotides, such as from 15-30, such as from 18-23 contiguous nucleotides.

[0063] As used herein, the terms “treatment” or “treating” are used in reference to a pharmaceutical or other intervention regimen for obtaining beneficial or desired results in the recipient. Beneficial or desired results include but are not limited to a therapeutic benefit and/or a prophylactic benefit. A therapeutic benefit may refer to eradication or amelioration of symptoms or of an underlying disorder being treated. Also, a therapeutic benefit can be achieved with the eradication or amelioration of one or more of the physiological symptoms associated with the underlying disorder such that an improvement is observed in the subject, notwithstanding that the subject may still be afflicted with the underlying disorder. A prophylactic effect includes delaying, preventing, or eliminating the appearance of a disease or condition, delaying or eliminating the onset of symptoms of a disease or condition, slowing, halting, or reversing the progression of a disease or condition, or any combination thereof. For prophylactic benefit, a subject at risk of developing a particular disease, or to a subject reporting one or more of the physiological symptoms of a disease may undergo treatment, even though a diagnosis of this disease may not have been made.

[0064] The term “a therapeutically effective amount” of a compound of the present application refers to an amount of the compound of the present application that will elicit the biological or medical response of a subject, for example, reduction or inhibition of tumor cell proliferation, or ameliorate symptoms, alleviate conditions, slow or delay disease progression, or prevent a disease, etc. In one non-limiting embodiment, the term “a therapeutically effective amount” refers to the amount of a compound of the present application that, when administered to a subject, is effective to at least partially alleviate, inhibit, prevent and/or ameliorate a condition, or a disorder or a disease, or at least partially inhibit activity of a targeted enzyme or receptor.

[0065] As used in the specification and claims, the singular forms “a”, “an” and “the” include plural references unless the context clearly dictates otherwise. For example, the term “a sample” includes a plurality of samples, including mixtures thereof.

[0066] As used herein, the terms “treatment” or “treating” are used in reference to a pharmaceutical or other intervention regimen for obtaining beneficial or desired results in the recipient. Beneficial or desired results include but are not limited to a therapeutic benefit and/or a prophylactic benefit. A therapeutic benefit may refer to eradication or amelioration of symptoms or of an underlying disorder being treated. Also, a therapeutic benefit can be achieved with the eradication or amelioration of one or more of the physiological symptoms associated with the underlying disorder such that an improvement is observed in the subject, notwithstanding that the subject may still be afflicted with the underlying disorder. A prophylactic effect includes delaying, preventing, or eliminating the appearance of a disease or condition, delaying or eliminating the onset of symptoms of a disease or condition, slowing, halting, or reversing the progression of a disease or condition, or any combination thereof. For prophylactic benefit, a subject at risk of developing a particular disease, or to a subject reporting one or more of the physiological symptoms of a disease may undergo treatment, even though a diagnosis of this disease may not have been made.

[0067] The term “a therapeutically effective amount” of a compound of the present application refers to an amount of the compound of the present application that will elicit the biological or medical response of a subject, for example, reduction or inhibition of tumor cell proliferation, or ameliorate symptoms, alleviate conditions, slow or delay disease progression, or prevent a disease, etc. In one non-limiting embodiment, the term “a therapeutically effective amount” refers to the amount of a compound of the present application that, when administered to a subject, is effective to at least partially alleviate, inhibit, prevent and/or ameliorate a condition, or a disorder or a disease, or at least partially inhibit activity of a targeted enzyme or receptor.

[0068] The terms “determining,” “measuring,” “evaluating,” “assessing,” “assaying,” and “analyzing” are often used interchangeably herein to refer to forms of measurement. The terms include determining if an element is present or not (for example, detection). These terms can include quantitative, qualitative or quantitative and qualitative determinations. Assessing can be relative or absolute. “Detecting the presence of” can include determining the amount of something present in addition to determining whether it is present or absent depending on the context.

[0069] The terms “subject,” “individual,” or “patient” are often used interchangeably herein. A “subject” can be a biological entity containing expressed genetic materials. The biological entity can be a plant, animal, or microorganism, including, for example, bacteria, viruses, fungi, and protozoa. The subject can be tissues, cells and their progeny of a biological entity obtained in vivo or cultured in vitro. The subject can be a mammal. The mammal can be a human. The subject may be diagnosed or suspected of being at high risk for a disease. In some cases, the subject is not necessarily diagnosed or suspected of being at high risk for the disease.

[0070] The term “in vivo” is used to describe an event that takes place in a subject's body.

[0071] The term “ex vivo” is used to describe an event that takes place outside of a subject's body. An ex vivo assay is not performed on a subject. Rather, it is performed upon a sample separate from a subject. An example of an ex vivo assay performed on a sample is an “in vitro” assay.

[0072] The term “in vitro” is used to describe an event that takes places contained in a container for holding laboratory reagent such that it is separated from the biological source from which the material is obtained. In vitro assays can encompass cell-based assays in which living or dead cells are employed. In vitro assays can also encompass a cell-free assay in which no intact cells are employed.

[0073] As used herein, the term “about” a number refers to that number plus or minus 10% of that number. The term “about” a range refers to that range minus 10% of its lowest value and plus 10% of its greatest value.

[0074] As used herein, the terms “treatment” or “treating” are used in reference to a pharmaceutical or other intervention regimen for obtaining beneficial or desired results in the recipient. Beneficial or desired results include but are not limited to a therapeutic benefit and/or a prophylactic benefit. A therapeutic benefit may refer to eradication or amelioration of symptoms or of an underlying disorder being treated. Also, a therapeutic benefit can be achieved with the eradication or amelioration of one or more of the physiological symptoms associated with the underlying disorder such that an improvement is observed in the subject, notwithstanding that the subject may still be afflicted with the underlying disorder. A prophylactic effect includes delaying, preventing, or eliminating the appearance of a disease or condition, delaying or eliminating the onset of symptoms of a disease or condition, slowing, halting, or reversing the progression of a disease or condition, or any combination thereof. For prophylactic benefit, a subject at risk of developing a particular disease, or to a subject reporting one or more of the physiological symptoms of a disease may undergo treatment, even though a diagnosis of this disease may not have been made.

[0075] The section headings used herein are for organizational purposes only and are not to be construed as limiting the subject matter described.

### EXAMPLES

[0076] The following examples are included for illustrative purposes only and are not intended to limit the scope of the present disclosure.

### Example 1: Cellular Modulation of FOXG1 Expression by ASOs

[0077] The designed antisense oligonucleotides (ASOs) targeting 3′ UTR region of a FOXG1 mRNA were tested for the ability to modulate (e.g., increase) FOXG1 expression in cells.

### Cells:

[0078] Cells were cultured in EMEM supplemented to contain 10% fetal calf serum, and 100U/ml Penicillin/100 ug/ml Streptomycin at 37° C. in an atmosphere with 5% CO₂ in a humidified incubator. For transfection of cells with ASOs, cells were generally seeded at a density of 15,000 cells/well into 96-well tissue culture plates (#655180, GBO, Germany).

### Transfection of ASOs:

[0079] Transfection of ASOs was carried out with lipofectamine for reverse transfection with 0.5 μL lipofectamine per well.

[0080] The single dose screen was performed with ASOs in quadruplicates at 50 nM, with two ASOs targeting AHSA1 (one 2′-O-methoxyethyl (MOE) and one 2′-O-methyl (oMe) ASO) and a siRNA targeting RLuc as unspecific controls and a mock transfection. After 24h of incubation with ASOs, medium was removed and cells were lysed in 150 μl Medium-Lysis Mixture (1 volume lysis mixture, 2 volumes cell culture medium) and then incubated at 53° C. for 30 minutes.

[0081] The two Ahsa1-ASOs (one 2′-oMe-modified and one 2′-O-methoxyethyl (MOE MOE)-modified) served at the same time as unspecific controls for respective target mRNA expression and as a positive control to analyze transfection efficiency with regards to Ahsa1 mRNA level. By hybridization with an Ahsa1 probe set, the mock transfected wells served as controls for Ahsa1 mRNA level. Transfection efficiency for each 96-well plate and both doses in the dual dose screen were calculated by relating Ahsa1-level with Ahsa1-ASO (normalized to GapDH) to Ahsa1-level obtained with mock controls.

Detection of FOXG1 mRNA:

[0082] QuantiGene detection was used to determine FOXG1 mRNA expression in cells lysates. In short, the QuantiGene assay directly measures target RNAs captured through probe hybridization and quantified through branched DNA technology that amplifies the signal. The signal is read using a Luminex or a luminometer for single targets. The assay measures RNA at the sample source, the assay avoids biases and variability inherent to extraction techniques and enzymatic manipulations. In addition, this direct measurement helps overcome issues with transcript degradation typically found in samples such as FFPE.

[0083] For the detection of FOXG1 mRNA, a Quantigene-Singleplex assay (1.0 for GapDH and 2.0 for FoxG1) was performed according to manufacturer's instructions (ThermoFisher, Germany). Luminescence was read using 1420 Luminescence Counter (WALLAC VICTOR Light, Perkin Elmer, Rodgau-Jügesheim, Germany) following 30 minutes incubation at RT in the dark. The probe sets used for FOXG1 mRNA detection are set forth in Table 1 (Human FoxG1 QG2.0 probe set (Accession #NM_005249): Oligosequences “CEs” and “LEs” are depicted without the proprietary parts of their sequences. Cross reactivity with the cyno sequence was obtained by adding additional probes). Control GapDH probe sets are set forth in Table 4 (Human GapDH QG1.0 probe set (Accession #NM_002046): Oligosequences “CEs” and “LEs” are depicted without the proprietary parts of their sequences.).

TABLE 1
Human FoxG1 QG2.0 probe set (Accession #NM_005249)

| Oligo name | sequence 5′-3′ | accession#, position & |
|---|---|---|
| QG2_hsFoxG1_1 | ggccagcttggcccg | NM_005249.1334.1348.LE |
| QG2_hsFoxG1_2 | gcgcaccgcgcttgaa | NM_005249.1349.1364.LE |
| QG2_hsFoxG1_3 | gccggtggaggtgaggc | NM_005249.1365.1381.CE |
| QG2_hsFoxG1_4 | cgcggtccatgaaggtgag | NM_005249.1382.1400.LE |
| QG2_hsFoxG1_5 | gccagtagagggagccgg | NM_005249.1401.1418.LE |
| QG2_hsFoxG1_6 | gacaggaagggcgacatgg | NM_005249.1419.1437.BL |
| QG2_hsFoxG1_7 | gcgggggtggtgcagg | NM_005249.1438.1453.BL |
| QG2_hsFoxG1_8 | tgtaactcaaagtgctgctggc | NM_005249.1454.1475.CE |
| QG2_hsFoxG1_9 | gccgacgtggtgccgt | NM_005249.1476.1491.LE |
| QG2_hsFoxG1_10 | atggggtggctggggtag | NM_005249.1492.1509.LE |
| QG2_hsFoxG1_11 | tcaacacggagctgtagggc | NM_005249.1510.1529.CE |
| QG2_hsFoxG1_12 | gttgcccagcgagttctgag | NM_005249.1530.1549.LE |
| QG2_hsFoxG1_13 | gcggtggagaaggagtggtt | NM_005249.1550.1569.LE |
| QG2_hsFoxG1_14 | ccacgctcaggccgttg | NM_005249.1570.1586.BL |
| QG2_hsFoxG1_15 | cccgttgaccagccggt | NM_005249.1587.1603.CE |
| QG2_hsFoxG1_16 | cgtggcgtacgggatctc | NM_005249.1604.1621.LE |
| QG2_hsFoxG1_17 | gcggccgtgaggtggtg | NM_005249.1622.1638.LE |
| QG2_hsFoxG1_18 | gaggcggctagcgcg | NM_005249.1639.1653.CE |
| QG2_hsFoxG1_19 | caggccgcagggcacc | NM_005249.1654.1669.LE |
| QG2_hsFoxG1_20 | ccagagcagggcaccga | NM_005249.1670.1686.LE |
| QG2_hsFoxG1_21 | caggggttgagggagtaggtc | NM_005249.1687.1707.CE |
| QG2_hsFoxG1_22 | gcgagcaggttgacggag | NM_005249.1708.1725.LE |
| QG2_hsFoxG1_23 | gaaaaagtaactggtctggccc | NM_005249.1726.1747.LE |
| QG2_hsFoxG1_24 | ggtgcgggacgtgggg | NM_005249.1748.1763.CE |
| QG2_hsFoxG1_25 | tgctctgcgaagtcattgacg | NM_005249.1764.1784.LE |
| QG2_hsFoxG1_26 | ggcgctcatggacgtgc | NM_005249.1785.1801.LE |
| QG2_hsFoxG1_27 | aggaggacgcggccct | NM_005249.1802.1817.CE |

TABLE 2
Human GapDH QG1.0 probe set (Accession #NM_002046)

| Oligo name | sequence 5′-3′ | accession#, position & |
|---|---|---|
| QG1_hsGAP_1 | gaatttgccatgggtggaat | NM_002046.252.271.CE |
| QG1_hsGAP_2 | ggagggatctcgctcctgga | NM_002046.333.352.CE |
| QG1_hsGAP_3 | ccccagccttctccatggt | NM_002046.413.431.CE |
| QG1_hsGAP_4 | gctcccccctgcaaatgag | NM_002046.432.450.CE |
| QG1_hsGAP_5 | agccttgacggtgccatg | NM_002046.272.289.LE |
| QG1_hsGAP_6 | gatgacaagcttcccgttctc | NM_002046.290.310.LE |
| QG1_hsGAP_7 | agatggtgatgggatttccatt | NM_002046.311.332.LE |
| QG1_hsGAP_8 | gcatcgccccacttgatttt | NM_002046.353.372.LE |
| QG1_hsGAP_9 | cacgacgtactcagcgcca | NM_002046.373.391.LE |
| QG1_hsGAP_10 | ggcagagatgatgacccttttg | NM_002046.451.472.LE |
| QG1_hsGAP_11 | ggtgaagacgccagtggactc | NM_002046.392.412.BL |

### Example 2: Cellular Increase of FOXG1 Expression by Select ASOs in Cells

[0084] The designed antisense oligonucleotides (ASOs) targeting a FOXG1 mRNA were further tested for the ability to modulate (e.g., increase) FOXG1 expression in cells.

### Transfection of ASOs and FOXG1 Quantification:

[0085] In cells, transfection was performed with ASOs at concentrations of 50 nM and 10 nM in replicate. After 24h of incubation with ASOs, medium was removed, the cells were lysed, and QuantiGene detection was used to determine FOXG1 mRNA expression in cells lysates.

### Modulation of FOXG1 Expression by ASOs:

[0086] Table 3 shows 2′-O-methoxyethyl (MOE) chemistry ASO targets associated with an increase in FOXG1 expression in HEK293, relative to mean of mock transfection control. ASOs are arranged by and listed in order of start position in FOXG1 mRNA (RefSeq NM_005249.5).

TABLE 3
ASO targets resulting in up-regulation of FOXG1 mRNA in cells
Oligo (Position in FOXG1 mRNA)

NM_005249.5_2061-2080
NM_005249.5_2062-2081
NM_005249.5_2063-2082
NM_005249.5_2064-2083
NM_005249.5_2065-2084
NM_005249.5_2961-2980
NM_005249.5_2962-2981
NM_005249.5_2963-2982
NM_005249.5_2964-2983
NM_005249.5_2965-2984
NM_005249.5_2966-2985
NM_005249.5_2967-2986
NM_005249.5_2968-2987
NM_005249.5_2969-2988
NM_005249.5_2970-2989
NM_005249.5_2971-2990
NM_005249.5_2973-2992
NM_005249.5_2976-2995
NM_005249.5_2977-2996
NM_005249.5_2978-2997
NM_005249.5_2983-3002
NM_005249.5_2984-3003
NM_005249.5_2985-3004
NM_005249.5_2986-3005
NM_005249.5_2987-3006
NM_005249.5_2990-3009
NM_005249.5_2991-3010
NM_005249.5_2992-3011
NM_005249.5_2993-3012
NM_005249.5_2994-3013
NM_005249.5_2995-3014
NM_005249.5_2996-3015
NM_005249.5_2997-3016
NM_005249.5_2998-3017
NM_005249.5_2999-3018
NM_005249.5_3000-3019
NM_005249.5_2061-2080
NM_005249.5_2062-2081
NM_005249.5_2063-2082
NM_005249.5_2064-2083
NM_005249.5_2065-2084
NM_005249.5_2961-2980
NM_005249.5_2962-2981
NM_005249.5_2963-2982
NM_005249.5_2964-2983
NM_005249.5_2965-2984
NM_005249.5_2966-2985
NM_005249.5_2967-2986
NM_005249.5_2968-2987
NM_005249.5_2969-2988
NM_005249.5_2970-2989
NM_005249.5_2971-2990
NM_005249.5_2973-2992
NM_005249.5_2976-2995
NM_005249.5_2977-2996
NM_005249.5_2978-2997
NM_005249.5_2983-3002
NM_005249.5_2984-3003
NM_005249.5_2985-3004
NM_005249.5_2986-3005
NM_005249.5_2987-3006
NM_005249.5_2990-3009
NM_005249.5_2991-3010
NM_005249.5_2992-3011
NM_005249.5_2993-3012
NM_005249.5_2994-3013
NM_005249.5_2995-3014
NM_005249.5_2996-3015
NM_005249.5_2997-3016
NM_005249.5_2998-3017
NM_005249.5_2999-3018
NM_005249.5_3000-3019

[0087] Table 4 shows ASO coverage of the FOXG1 mRNA and data for select ASOs associated with the modulation of FOXG1 expression in CFF-STTG1 and SW1783 cell lines. ASOs are arranged by and listed in order of start position in FOXG1 mRNA (RefSeq NM_005249.5).

TABLE 4
ASO targets resulting in upregulation of
FOXG1 mRNA in CFF-STTG1 and SW1783 cells
Oligo (Position in FoxG1 mRNA)

NM_005249.5_2061-2080_as
NM_005249.5_2064-2083_as
NM_005249.5_2965-2984_as
NM_005249.5_2967-2986_as
NM_005249.5_2968-2987_as
NM_005249.5_2995-3014_as
NM_005249.5_2996-3015_as
NM_005249.5_2061-2080_as
NM_005249.5_2064-2083_as
NM_005249.5_2965-2984_as
NM_005249.5_2967-2986_as
NM_005249.5_2968-2987_as
NM_005249.5_2995-3014_as
NM_005249.5_2996-3015_as
NM_005249.5_2061-2080_as
NM_005249.5_2064-2083_as
NM_005249.5_2965-2984_as
NM_005249.5_2967-2986_as
NM_005249.5_2968-2987_as
NM_005249.5_2995-3014_as
NM_005249.5_2996-3015_as
NM_005249.5_2061-2080_as
NM_005249.5_2064-2083_as
NM_005249.5_2965-2984_as
NM_005249.5_2967-2986_as
NM_005249.5_2968-2987_as
NM_005249.5_2995-3014_as
NM_005249.5_2996-3015_as

### Example 3: Cellular Increase of FOXG1 Expression by Select Modified ASOs in Cells

[0088] Three exemplary designed antisense oligonucleotide (ASO) sequences targeting a FOXG1 mRNA were modified, generating 189 (63×3) modified ASOs. These 189 modified ASOs were tested for the ability to modulate (e.g., increase) FOXG1 expression in cells.

### Modified ASOs:

[0089] Each of the following three ASOs was selected as the base sequence for modification:

TABLE 5
Base ASO Sequences

| Name | Base Sequence | Base SEQ NO. |
|---|---|---|
| NM_005249.5_2061-2080_as_MOE | AACGTACAGAAATGGGAGGG | 100 |
| NM_005249.5_2062-2081_as_MOE | AAACGTACAGAAATGGGAGG | 101 |
| NM_005249.5_2965-2984_as_MOE | TAAATTTTAGTTTGGCTGAA | 284 |

[0090] Base modifications made to the three base sequences were as follows:

TABLE 6
Base modification code

| Code | Modified Base |
|---|---|
| Am | 2′-O-methoxy-ethyl A |
| Tm | 2′-O-methoxy-ethyl T |
| Cm | 2′-O-methoxy-ethyl C |
| Gm | 2′-O-methoxy-ethyl G |
| Ab | LNA A |
| Tb | LNA T |
| Cb | LNA C |
| Gb | LNA G |
| s | phosphorothioate linkage |

### Generated Modified ASOs:

TABLE 6
NM_005249.5_2061-2080 as MOE Modification Sequences

| Name | Sequence |
|---|---|
| NM_005249.5_2965- | TmsAmsAmsAmsTmsTmsTmsTmsAmsGmsTmsTmsTmsGmsGmsCmsTm |
| 2984_as_MOE | sGmsAmsAm |
| NM_005249.5_2965- | TbsAmsAmsAmsTmsTmsTmsTmsAmsGmsTmsTmsTmsGmsGmsCmsTm |
| 2984_as_MOE_L1 | sGmsAmsAm |
| NM_005249.5_2965- | TmsAbsAmsAmsTmsTmsTmsTmsAmsGmsTmsTmsTmsGmsGmsCmsTm |
| 2984_as_MOE_L2 | sGmsAmsAm |
| NM_005249.5_2965- | TmsAmsAbsAmsTmsTmsTmsTmsAmsGmsTmsTmsTmsGmsGmsCmsTm |
| 2984_as_MOE_L3 | sGmsAmsAm |
| NM_005249.5_2965- | TmsAmsAmsAbsTmsTmsTmsTmsAmsGmsTmsTmsTmsGmsGmsCmsTm |
| 2984_as_MOE_L4 | sGmsAmsAm |
| NM_005249.5_2965- | TmsAmsAmsAmsTbsTmsTmsTmsAmsGmsTmsTmsTmsGmsGmsCmsTm |
| 2984_as_MOE_L5 | sGmsAmsAm |
| NM_005249.5_2965- | TmsAmsAmsAmsTmsTbsTmsTmsAmsGmsTmsTmsTmsGmsGmsCmsTm |
| 2984_as_MOE_L6 | sGmsAmsAm |
| NM_005249.5_2965- | TmsAmsAmsAmsTmsTmsTbsTmsAmsGmsTmsTmsTmsGmsGmsCmsTm |
| 2984_as_MOE_L7 | sGmsAmsAm |
| NM_005249.5_2965- | TmsAmsAmsAmsTmsTmsTmsTbsAmsGmsTmsTmsTmsGmsGmsCmsTm |
| 2984_as_MOE_L8 | sGmsAmsAm |
| NM_005249.5_2965- | TmsAmsAmsAmsTmsTmsTmsTmsAbsGmsTmsTmsTmsGmsGmsCmsTm |
| 2984_as_MOE_L9 | sGmsAmsAm |
| NM_005249.5_2965- | TmsAmsAmsAmsTmsTmsTmsTmsAmsGbsTmsTmsTmsGmsGmsCmsTm |
| 2984_as_MOE_L10 | sGmsAmsAm |
| NM_005249.5_2965- | TmsAmsAmsAmsTmsTmsTmsTmsAmsGmsTbsTmsTmsGmsGmsCmsTm |
| 2984_as_MOE_L11 | sGmsAmsAm |
| NM_005249.5_2965- | TmsAmsAmsAmsTmsTmsTmsTmsAmsGmsTmsTbsTmsGmsGmsCmsTm |
| 2984_as_MOE_L12 | sGmsAmsAm |
| NM_005249.5_2965- | TmsAmsAmsAmsTmsTmsTmsTmsAmsGmsTmsTmsTbsGmsGmsCmsTm |
| 2984_as_MOE_L13 | sGmsAmsAm |
| NM_005249.5_2965- | TmsAmsAmsAmsTmsTmsTmsTmsAmsGmsTmsTmsTmsGbsGmsCmsTm |
| 2984_as_MOE_L14 | sGmsAmsAm |
| NM_005249.5_2965- | TmsAmsAmsAmsTmsTmsTmsTmsAmsGmsTmsTmsTmsGmsGbsCmsTm |
| 2984_as_MOE_L15 | sGmsAmsAm |
| NM_005249.5_2965- | TmsAmsAmsAmsTmsTmsTmsTmsAmsGmsTmsTmsTmsGmsGmsCbsTm |
| 2984_as_MOE_L16 | sGmsAmsAm |
| NM_005249.5_2965- | TmsAmsAmsAmsTmsTmsTmsTmsAmsGmsTmsTmsTmsGmsGmsCmsTb |
| 2984_as_MOE_L17 | sGmsAmsAm |
| NM_005249.5_2965- | TmsAmsAmsAmsTmsTmsTmsTmsAmsGmsTmsTmsTmsGmsGmsCmsTm |
| 2984_as_MOE_L18 | sGbsAmsAm |
| NM_005249.5_2965- | TmsAmsAmsAmsTmsTmsTmsTmsAmsGmsTmsTmsTmsGmsGmsCmsTm |
| 2984_as_MOE_L19 | sGmsAbsAm |
| NM_005249.5_2965- | TmsAmsAmsAmsTmsTmsTmsTmsAmsGmsTmsTmsTmsGmsGmsCmsTm |
| 2984_as_MOE_L20 | sGmsAmsAb |
| NM_005249.5_2965- | TbsAmsAmsAmsTmsTmsTmsTmsAmsGmsTmsTmsTmsGmsGmsCmsTm |
| 2984_as_MOE_L1_L20 | sGmsAmsAb |
| NM_005249.5_2965- | TmsAbsAmsAmsTmsTmsTmsTmsAmsGmsTmsTmsTmsGmsGmsCmsTm |
| 2984_as_MOE_L2_L19 | sGmsAbsAm |
| NM_005249.5_2965- | TmsAmsAbsAmsTmsTmsTmsTmsAmsGmsTmsTmsTmsGmsGmsCmsTm |
| 2984_as_MOE_L3_L18 | sGbsAmsAm |
| NM_005249.5_2965- | TmsAmsAmsAbsTmsTmsTmsTmsAmsGmsTmsTmsTmsGmsGmsCmsTb |
| 2984_as_MOE_L4_L17 | sGmsAmsAm |
| NM_005249.5_2965- | TmsAmsAmsAmsTbsTmsTmsTmsAmsGmsTmsTmsTmsGmsGmsCbsTm |
| 2984_as_MOE_L5_L16 | sGmsAmsAm |
| NM_005249.5_2965- | TmsAmsAmsAmsTmsTbsTmsTmsAmsGmsTmsTmsTmsGmsGbsCmsTm |
| 2984_as_MOE_L6_L15 | sGmsAmsAm |
| NM_005249.5_2965- | TmsAmsAmsAmsTmsTmsTbsTmsAmsGmsTmsTmsTmsGbsGmsCmsTm |
| 2984_as_MOE_L7_L14 | sGmsAmsAm |
| NM_005249.5_2965- | TmsAmsAmsAmsTmsTmsTmsTbsAmsGmsTmsTmsTbsGmsGmsCmsTm |
| 2984_as_MOE_L8_L13 | sGmsAmsAm |
| NM_005249.5_2965- | TmsAmsAmsAmsTmsTmsTmsTmsAbsGmsTmsTbsTmsGmsGmsCmsTm |
| 2984_as_MOE_L9_L12 | sGmsAmsAm |
| NM_005249.5_2965- | TmsAmsAmsAmsTmsTmsTmsTmsAmsGbsTbsTmsTmsGmsGmsCmsTm |
| 2984_as_MOE_L10_L11 | sGmsAmsAm |
| NM_005249.5_2965- | TmsAmAmsAmsTmsTmsTmsTmsAmsGmsTmsTmsTmsGmsGmsCmsTms |
| 2984_as_MOE_PO2 | GmsAmsAm |
| NM_005249.5_2965- | TmsAmsAmAmsTmsTmsTmsTmsAmsGmsTmsTmsTmsGmsGmsCmsTms |
| 2984_as_MOE_PO3 | GmsAmsAm |
| NM_005249.5_2965- | TmsAmsAmsAmTmsTmsTmsTmsAmsGmsTmsTmsTmsGmsGmsCmsTms |
| 2984_as_MOE_PO4 | GmsAmsAm |
| NM_005249.5_2965- | TmsAmsAmsAmsTmTmsTmsTmsAmsGmsTmsTmsTmsGmsGmsCmsTms |
| 2984_as_MOE_PO5 | GmsAmsAm |
| NM_005249.5_2965- | TmsAmsAmsAmsTmsTmTmsTmsAmsGmsTmsTmsTmsGmsGmsCmsTms |
| 2984_as_MOE_PO6 | GmsAmsAm |
| NM_005249.5_2965- | TmsAmsAmsAmsTmsTmsTmTmsAmsGmsTmsTmsTmsGmsGmsCmsTms |
| 2984_as_MOE_PO7 | GmsAmsAm |
| NM_005249.5_2965- | TmsAmsAmsAmsTmsTmsTmsTmAmsGmsTmsTmsTmsGmsGmsCmsTms |
| 2984_as_MOE_PO8 | GmsAmsAm |
| NM_005249.5_2965- | TmsAmsAmsAmsTmsTmsTmsTmsAmGmsTmsTmsTmsGmsGmsCmsTms |
| 2984_as_MOE_PO9 | GmsAmsAm |
| NM_005249.5_2965- | TmsAmsAmsAmsTmsTmsTmsTmsAmsGmTmsTmsTmsGmsGmsCmsTms |
| 2984_as_MOE_PO10 | GmsAmsAm |
| NM_005249.5_2965- | TmsAmsAmsAmsTmsTmsTmsTmsAmsGmsTmTmsTmsGmsGmsCmsTms |
| 2984_as_MOE_PO11 | GmsAmsAm |
| NM_005249.5_2965- | TmsAmsAmsAmsTmsTmsTmsTmsAmsGmsTmsTmTmsGmsGmsCmsTms |
| 2984_as_MOE_PO12 | GmsAmsAm |
| NM_005249.5_2965- | TmsAmsAmsAmsTmsTmsTmsTmsAmsGmsTmsTmsTmGmsGmsCmsTms |
| 2984_as_MOE_PO13 | GmsAmsAm |
| NM_005249.5_2965- | TmsAmsAmsAmsTmsTmsTmsTmsAmsGmsTmsTmsTmsGmGmsCmsTms |
| 2984_as_MOE_PO14 | GmsAmsAm |
| NM_005249.5_2965- | TmsAmsAmsAmsTmsTmsTmsTmsAmsGmsTmsTmsTmsGmsGmCmsTms |
| 2984_as_MOE_PO15 | GmsAmsAm |
| NM_005249.5_2965- | TmsAmsAmsAmsTmsTmsTmsTmsAmsGmsTmsTmsTmsGmsGmsCmTms |
| 2984_as_MOE_PO16 | GmsAmsAm |
| NM_005249.5_2965- | TmsAmsAmsAmsTmsTmsTmsTmsAmsGmsTmsTmsTmsGmsGmsCmsTm |
| 2984_as_MOE_PO17 | GmsAmsAm |
| NM_005249.5_2965- | TmsAmsAmsAmsTmsTmsTmsTmsAmsGmsTmsTmsTmsGmsGmsCmsTm |
| 2984_as_MOE_PO18 | sGmAmsAm |
| NM_005249.5_2965- | TmsAmAmsAmsTmsTmsTmsTmsAmsGmsTmsTmsTmsGmsGmsCmsTms |
| 2984_as_MOE_PO2_ | GmAmsAm |
| PO18 | |
| NM_005249.5_2965- | TmsAmsAmAmsTmsTmsTmsTmsAmsGmsTmsTmsTmsGmsGmsCmsTmG |
| 2984_as_MOE_PO3_ | msAmsAm |
| PO17 | |
| NM_005249.5_2965- | TmsAmsAmsAmTmsTmsTmsTmsAmsGmsTmsTmsTmsGmsGmsCmTmsG |
| 2984_as_MOE_PO4_ | msAmsAm |
| PO16 | |
| NM_005249.5_2965- | TmsAmsAmsAmsTmTmsTmsTmsAmsGmsTmsTmsTmsGmsGmCmsTmsG |
| 2984_as_MOE_PO5_ | msAmsAm |
| PO15 | |
| NM_005249.5_2965- | TmsAmsAmsAmsTmsTmTmsTmsAmsGmsTmsTmsTmsGmGmsCmsTmsG |
| 2984_as_MOE_PO6_ | msAmsAm |
| PO14 | |
| NM_005249.5_2965- | TmsAmsAmsAmsTmsTmsTmTmsAmsGmsTmsTmsTmGmsGmsCmsTmsG |
| 2984_as_MOE_PO7_ | msAmsAm |
| PO13 | |
| NM_005249.5_2965- | TmsAmsAmsAmsTmsTmsTmsTmAmsGmsTmsTmTmsGmsGmsCmsTmsG |
| 2984_as_MOE_PO8_ | msAmsAm |
| PO12 | |
| NM_005249.5_2965- | TmsAmsAmsAmsTmsTmsTmsTmsAmGmsTmTmsTmsGmsGmsCmsTmsG |
| 2984_as_MOE_PO9_ | msAmsAm |
| PO11 | |
| NM_005249.5_2965- | TmsAmsAmsAmsTmsTmsTmsTmsAmGmTmsTmsTmsGmsGmsCmsTmsG |
| 2984_as_MOE_PO9_ | msAmsAm |
| PO10 | |
| NM_005249.5_2965- | TmsAmsAmsAmsTmsTmsTmsTmsAmsGmTmTmsTmsGmsGmsCmsTmsG |
| 2984_as_MOE_PO10_ | msAmsAm |
| PO11 | |
| NM_005249.5_2965- | TmsAmAmsAmsTmsTmsTmsTmsAmsGmsTmsTmsTmsGmsGmsCmsTmG |
| 2984_as_MOE_PO2_ | msAmsAm |
| PO17 | |
| NM_005249.5_2965- | TmsAmsAmAmsTmsTmsTmsTmsAmsGmsTmsTmsTmsGmsGmsCmsTms |
| 2984_as_MOE_PO3_ | GmAmsAm |
| PO18 | |
| NM_005249.5_2965- | TmsAmsAmAmsTmsTmsTmsTmsAmsGmsTmsTmsTmsGmsGmsCmTmsG |
| 2984_as_MOE_PO3_ | msAmsAm |
| PO16 | |
| NM_005249.5_2965- | TmsAmsAmsAmTmsTmsTmsTmsAmsGmsTmsTmsTmsGmsGmsCmsTmG |
| 2984_as_MOE_PO4_ | msAmsAm |
| PO17 | |
| NM_005249.5_2965- | TmsAmsAmsAmTmsTmsTmsTmsAmsGmsTmsTmsTmsGmsGmCmsTmsG |
| 2984_as_MOE_PO4_ | msAmsAm |
| PO15 | |
| NM_005249.5_2965- | TmsAmsAmsAmsTmTmsTmsTmsAmsGmsTmsTmsTmsGmsGmsCmTmsG |
| 2984_as_MOE_PO5_ | msAmsAm |
| PO16 | |

TABLE 7
NM_005249.5 2062-2081 as MOE Modification Sequences

| Name | Sequence |
|---|---|
| NM_005249.5_2062- | AmsAmsAmsCmsGmsTmsAmsCmsAmsGmsAmsAmsAmsTmsGmsGmsGm |
| 2081_as_MOE | sAmsGmsGm |
| NM_005249.5_2062- | AbsAmsAmsCmsGmsTmsAmsCmsAmsGmsAmsAmsAmsTmsGmsGmsGm |
| 2081_as_MOE_L1 | sAmsGmsGm |
| NM_005249.5_2062- | AmsAbsAmsCmsGmsTmsAmsCmsAmsGmsAmsAmsAmsTmsGmsGmsGm |
| 2081_as_MOE_L2 | sAmsGmsGm |
| NM_005249.5_2062- | AmsAmsAbsCmsGmsTmsAmsCmsAmsGmsAmsAmsAmsTmsGmsGmsGm |
| 2081_as_MOE_L3 | sAmsGmsGm |
| NM_005249.5_2062- | AmsAmsAmsCbsGmsTmsAmsCmsAmsGmsAmsAmsAmsTmsGmsGmsGm |
| 2081_as_MOE_L4 | sAmsGmsGm |
| NM_005249.5_2062- | AmsAmsAmsCmsGbsTmsAmsCmsAmsGmsAmsAmsAmsTmsGmsGmsGm |
| 2081_as_MOE_L5 | sAmsGmsGm |
| NM_005249.5_2062- | AmsAmsAmsCmsGmsTbsAmsCmsAmsGmsAmsAmsAmsTmsGmsGmsGm |
| 2081_as_MOE_L6 | sAmsGmsGm |
| NM_005249.5_2062- | AmsAmsAmsCmsGmsTmsAbsCmsAmsGmsAmsAmsAmsTmsGmsGmsGm |
| 2081_as_MOE_L7 | sAmsGmsGm |
| NM_005249.5_2062- | AmsAmsAmsCmsGmsTmsAmsCbsAmsGmsAmsAmsAmsTmsGmsGmsGm |
| 2081_as_MOE_L8 | sAmsGmsGm |
| NM_005249.5_2062- | AmsAmsAmsCmsGmsTmsAmsCmsAbsGmsAmsAmsAmsTmsGmsGmsGm |
| 2081_as_MOE_L9 | sAmsGmsGm |
| NM_005249.5_2062- | AmsAmsAmsCmsGmsTmsAmsCmsAmsGbsAmsAmsAmsTmsGmsGmsGm |
| 2081_as_MOE_L10 | sAmsGmsGm |
| NM_005249.5_2062- | AmsAmsAmsCmsGmsTmsAmsCmsAmsGmsAbsAmsAmsTmsGmsGmsGm |
| 2081_as_MOE_L11 | sAmsGmsGm |
| NM_005249.5_2062- | AmsAmsAmsCmsGmsTmsAmsCmsAmsGmsAmsAbsAmsTmsGmsGmsGm |
| 2081_as_MOE_L12 | sAmsGmsGm |
| NM_005249.5_2062- | AmsAmsAmsCmsGmsTmsAmsCmsAmsGmsAmsAmsAbsTmsGmsGmsGm |
| 2081_as_MOE_L13 | sAmsGmsGm |
| NM_005249.5_2062- | AmsAmsAmsCmsGmsTmsAmsCmsAmsGmsAmsAmsAmsTbsGmsGmsGm |
| 2081_as_MOE_L14 | sAmsGmsGm |
| NM_005249.5_2062- | AmsAmsAmsCmsGmsTmsAmsCmsAmsGmsAmsAmsAmsTmsGbsGmsGm |
| 2081_as_MOE_L15 | sAmsGmsGm |
| NM_005249.5_2062- | AmsAmsAmsCmsGmsTmsAmsCmsAmsGmsAmsAmsAmsTmsGmsGbsGm |
| 2081_as_MOE_L16 | sAmsGmsGm |
| NM_005249.5_2062- | AmsAmsAmsCmsGmsTmsAmsCmsAmsGmsAmsAmsAmsTmsGmsGmsGb |
| 2081_as_MOE_L17 | sAmsGmsGm |
| NM_005249.5_2062- | AmsAmsAmsCmsGmsTmsAmsCmsAmsGmsAmsAmsAmsTmsGmsGmsGm |
| 2081_as_MOE_L18 | sAbsGmsGm |
| NM_005249.5_2062- | AmsAmsAmsCmsGmsTmsAmsCmsAmsGmsAmsAmsAmsTmsGmsGmsGm |
| 2081_as_MOE_L19 | sAmsGbsGm |
| NM_005249.5_2062- | AmsAmsAmsCmsGmsTmsAmsCmsAmsGmsAmsAmsAmsTmsGmsGmsGm |
| 2081_as_MOE_L20 | sAmsGmsGb |
| NM_005249.5_2062- | AbsAmsAmsCmsGmsTmsAmsCmsAmsGmsAmsAmsAmsTmsGmsGmsGm |
| 2081_as_MOE_L1_L20 | sAmsGmsGb |
| NM_005249.5_2062- | AmsAbsAmsCmsGmsTmsAmsCmsAmsGmsAmsAmsAmsTmsGmsGmsGm |
| 2081_as_MOE_L2_L19 | sAmsGbsGm |
| NM_005249.5_2062- | AmsAmsAbsCmsGmsTmsAmsCmsAmsGmsAmsAmsAmsTmsGmsGmsGm |
| 2081_as_MOE_L3_L18 | sAbsGmsGm |
| NM_005249.5_2062- | AmsAmsAmsCbsGmsTmsAmsCmsAmsGmsAmsAmsAmsTmsGmsGmsGb |
| 2081_as_MOE_L4_L17 | sAmsGmsGm |
| NM_005249.5_2062- | AmsAmsAmsCmsGbsTmsAmsCmsAmsGmsAmsAmsAmsTmsGmsGbsGm |
| 2081_as_MOE_L5_L16 | sAmsGmsGm |
| NM_005249.5_2062- | AmsAmsAmsCmsGmsTbsAmsCmsAmsGmsAmsAmsAmsTmsGbsGmsGm |
| 2081_as_MOE_L6_L15 | sAmsGmsGm |
| NM_005249.5_2062- | AmsAmsAmsCmsGmsTmsAbsCmsAmsGmsAmsAmsAmsTbsGmsGmsGm |
| 2081_as_MOE_L7_L14 | sAmsGmsGm |
| NM_005249.5_2062- | AmsAmsAmsCmsGmsTmsAmsCbsAmsGmsAmsAmsAbsTmsGmsGmsGm |
| 2081_as_MOE_L8_L13 | sAmsGmsGm |
| NM_005249.5_2062- | AmsAmsAmsCmsGmsTmsAmsCmsAbsGmsAmsAbsAmsTmsGmsGmsGm |
| 2081_as_MOE_L9_L12 | sAmsGmsGm |
| NM_005249.5_2062- | AmsAmsAmsCmsGmsTmsAmsCmsAmsGbsAbsAmsAmsTmsGmsGmsGm |
| 2081_as_MOE_L10_L11 | sAmsGmsGm |
| NM_005249.5_2062- | AmsAmAmsCmsGmsTmsAmsCmsAmsGmsAmsAmsAmsTmsGmsGmsGms |
| 2081_as_MOE_PO2 | AmsGmsGm |
| NM_005249.5_2062- | AmsAmsAmCmsGmsTmsAmsCmsAmsGmsAmsAmsAmsTmsGmsGmsGms |
| 2081_as_MOE_PO3 | AmsGmsGm |
| NM_005249.5_2062- | AmsAmsAmsCmGmsTmsAmsCmsAmsGmsAmsAmsAmsTmsGmsGmsGms |
| 2081_as_MOE_PO4 | AmsGmsGm |
| NM_005249.5_2062- | AmsAmsAmsCmsGmTmsAmsCmsAmsGmsAmsAmsAmsTmsGmsGmsGms |
| 2081_as_MOE_PO5 | AmsGmsGm |
| NM_005249.5_2062- | AmsAmsAmsCmsGmsTmAmsCmsAmsGmsAmsAmsAmsTmsGmsGmsGms |
| 2081_as_MOE_PO6 | AmsGmsGm |
| NM_005249.5_2062- | AmsAmsAmsCmsGmsTmsAmCmsAmsGmsAmsAmsAmsTmsGmsGmsGms |
| 2081_as_MOE_PO7 | AmsGmsGm |
| NM_005249.5_2062- | AmsAmsAmsCmsGmsTmsAmsCmAmsGmsAmsAmsAmsTmsGmsGmsGms |
| 2081_as_MOE_PO8 | AmsGmsGm |
| NM_005249.5_2062- | AmsAmsAmsCmsGmsTmsAmsCmsAmGmsAmsAmsAmsTmsGmsGmsGms |
| 2081_as_MOE_PO9 | AmsGmsGm |
| NM_005249.5_2062- | AmsAmsAmsCmsGmsTmsAmsCmsAmsGmAmsAmsAmsTmsGmsGmsGms |
| 2081_as_MOE_PO10 | AmsGmsGm |
| NM_005249.5_2062- | AmsAmsAmsCmsGmsTmsAmsCmsAmsGmsAmAmsAmsTmsGmsGmsGms |
| 2081_as_MOE_PO11 | AmsGmsGm |
| NM_005249.5_2062- | AmsAmsAmsCmsGmsTmsAmsCmsAmsGmsAmsAmAmsTmsGmsGmsGms |
| 2081_as_MOE_PO12 | AmsGmsGm |
| NM_005249.5_2062- | AmsAmsAmsCmsGmsTmsAmsCmsAmsGmsAmsAmsAmTmsGmsGmsGms |
| 2081_as_MOE_PO13 | AmsGmsGm |
| NM_005249.5_2062- | AmsAmsAmsCmsGmsTmsAmsCmsAmsGmsAmsAmsAmsTmGmsGmsGms |
| 2081_as_MOE_PO14 | AmsGmsGm |
| NM_005249.5_2062- | AmsAmsAmsCmsGmsTmsAmsCmsAmsGmsAmsAmsAmsTmsGmGmsGms |
| 2081_as_MOE_PO15 | AmsGmsGm |
| NM_005249.5_2062- | AmsAmsAmsCmsGmsTmsAmsCmsAmsGmsAmsAmsAmsTmsGmsGmGms |
| 2081_as_MOE_PO16 | AmsGmsGm |
| NM_005249.5_2062- | AmsAmsAmsCmsGmsTmsAmsCmsAmsGmsAmsAmsAmsTmsGmsGmsGm |
| 2081_as_MOE_PO17 | AmsGmsGm |
| NM_005249.5_2062- | AmsAmsAmsCmsGmsTmsAmsCmsAmsGmsAmsAmsAmsTmsGmsGmsGm |
| 2081_as_MOE_PO18 | sAmGmsGm |
| NM_005249.5_2062- | AmsAmAmsCmsGmsTmsAmsCmsAmsGmsAmsAmsAmsTmsGmsGmsGms |
| 2081_as_MOE_PO2_ | AmGmsGm |
| PO18 | |
| NM_005249.5_2062- | AmsAmsAmCmsGmsTmsAmsCmsAmsGmsAmsAmsAmsTmsGmsGmsGmA |
| 2081_as_MOE_PO3_ | msGmsGm |
| PO17 | |
| NM_005249.5_2062- | AmsAmsAmsCmGmsTmsAmsCmsAmsGmsAmsAmsAmsTmsGmsGmGmsA |
| 2081_as_MOE_PO4_ | msGmsGm |
| PO16 | |
| NM_005249.5_2062- | AmsAmsAmsCmsGmTmsAmsCmsAmsGmsAmsAmsAmsTmsGmGmsGmsA |
| 2081_as_MOE_PO5_ | msGmsGm |
| PO15 | |
| NM_005249.5_2062- | AmsAmsAmsCmsGmsTmAmsCmsAmsGmsAmsAmsAmsTmGmsGmsGmsA |
| 2081_as_MOE_PO6_ | msGmsGm |
| PO14 | |
| NM_005249.5_2062- | AmsAmsAmsCmsGmsTmsAmCmsAmsGmsAmsAmsAmTmsGmsGmsGmsA |
| 2081_as_MOE_PO7_ | msGmsGm |
| PO13 | |
| NM_005249.5_2062- | AmsAmsAmsCmsGmsTmsAmsCmAmsGmsAmsAmAmsTmsGmsGmsGmsA |
| 2081_as_MOE_PO8_ | msGmsGm |
| PO12 | |
| NM_005249.5_2062- | AmsAmsAmsCmsGmsTmsAmsCmsAmGmsAmAmsAmsTmsGmsGmsGmsA |
| 2081_as_MOE_PO9_ | msGmsGm |
| PO11 | |
| NM_005249.5_2062- | AmsAmsAmsCmsGmsTmsAmsCmsAmGmAmsAmsAmsTmsGmsGmsGmsA |
| 2081_as_MOE_PO9_ | msGmsGm |
| PO10 | |
| NM_005249.5_2062- | AmsAmsAmsCmsGmsTmsAmsCmsAmsGmAmAmsAmsTmsGmsGmsGmsA |
| 2081_as_MOE_PO10_ | msGmsGm |
| PO11 | |
| NM_005249.5_2062- | AmsAmAmsCmsGmsTmsAmsCmsAmsGmsAmsAmsAmsTmsGmsGmsGmA |
| 2081_as_MOE_PO2_ | msGmsGm |
| PO17 | |
| NM_005249.5_2062- | AmsAmsAmCmsGmsTmsAmsCmsAmsGmsAmsAmsAmsTmsGmsGmsGms |
| 2081_as_MOE_PO3_ | AmGmsGm |
| PO18 | |
| NM_005249.5_2062- | AmsAmsAmCmsGmsTmsAmsCmsAmsGmsAmsAmsAmsTmsGmsGmGmsA |
| 2081_as_MOE_PO3_ | msGmsGm |
| PO16 | |
| NM_005249.5_2062- | AmsAmsAmsCmGmsTmsAmsCmsAmsGmsAmsAmsAmsTmsGmsGmsGmA |
| 2081_as_MOE_PO4_ | msGmsGm |
| PO17 | |
| NM_005249.5_2062- | AmsAmsAmsCmGmsTmsAmsCmsAmsGmsAmsAmsAmsTmsGmGmsGmsA |
| 2081_as_MOE_PO4_ | msGmsGm |
| PO15 | |
| NM_005249.5_2062- | AmsAmsAmsCmsGmTmsAmsCmsAmsGmsAmsAmsAmsTmsGmsGmGmsA |
| 2081_as_MOE_PO5_ | msGmsGm |
| PO16 | |

TABLE 8
NM_005249.5 2061-2080 as MOE Modification Sequences

| Name | Sequence |
|---|---|
| NM_005249.5_2061- | AmsAmsCmsGmsTmsAmsCmsAmsGmsAmsAmsAmsTmsGmsGmsGmsAm |
| 2080_as_MOE | sGmsGmsGm |
| NM_005249.5_2061- | AbsAmsCmsGmsTmsAmsCmsAmsGmsAmsAmsAmsTmsGmsGmsGmsAm |
| 2080_as_MOE_L1 | SGmsGmsGm |
| NM_005249.5_2061- | AmsAbsCmsGmsTmsAmsCmsAmsGmsAmsAmsAmsTmsGmsGmsGmsAm |
| 2080_as_MOE_L2 | sGmsGmsGm |
| NM_005249.5_2061- | AmsAmsCbsGmsTmsAmsCmsAmsGmsAmsAmsAmsTmsGmsGmsGmsAm |
| 2080_as_MOE_L3 | sGmsGmsGm |
| NM_005249.5_2061- | AmsAmsCmsGbsTmsAmsCmsAmsGmsAmsAmsAmsTmsGmsGmsGmsAm |
| 2080_as_MOE_L4 | sGmsGmsGm |
| NM_005249.5_2061- | AmsAmsCmsGmsTbsAmsCmsAmsGmsAmsAmsAmsTmsGmsGmsGmsAm |
| 2080_as_MOE_L5 | sGmsGmsGm |
| NM_005249.5_2061- | AmsAmsCmsGmsTmsAbsCmsAmsGmsAmsAmsAmsTmsGmsGmsGmsAm |
| 2080_as_MOE_L6 | sGmsGmsGm |
| NM_005249.5_2061- | AmsAmsCmsGmsTmsAmsCbsAmsGmsAmsAmsAmsTmsGmsGmsGmsAm |
| 2080_as_MOE_L7 | sGmsGmsGm |
| NM_005249.5_2061- | AmsAmsCmsGmsTmsAmsCmsAbsGmsAmsAmsAmsTmsGmsGmsGmsAm |
| 2080_as_MOE_L8 | sGmsGmsGm |
| NM_005249.5_2061- | AmsAmsCmsGmsTmsAmsCmsAmsGbsAmsAmsAmsTmsGmsGmsGmsAm |
| 2080_as_MOE_L9 | sGmsGmsGm |
| NM_005249.5_2061- | AmsAmsCmsGmsTmsAmsCmsAmsGmsAbsAmsAmsTmsGmsGmsGmsAm |
| 2080_as_MOE_L10 | sGmsGmsGm |
| NM_005249.5_2061- | AmsAmsCmsGmsTmsAmsCmsAmsGmsAmsAbsAmsTmsGmsGmsGmsAm |
| 2080_as_MOE_L11 | sGmsGmsGm |
| NM_005249.5_2061- | AmsAmsCmsGmsTmsAmsCmsAmsGmsAmsAmsAbsTmsGmsGmsGmsAm |
| 2080_as_MOE_L12 | sGmsGmsGm |
| NM_005249.5_2061- | AmsAmsCmsGmsTmsAmsCmsAmsGmsAmsAmsAmsTbsGmsGmsGmsAm |
| 2080_as_MOE_L13 | sGmsGmsGm |
| NM_005249.5_2061- | AmsAmsCmsGmsTmsAmsCmsAmsGmsAmsAmsAmsTmsGbsGmsGmsAm |
| 2080_as_MOE_L14 | sGmsGmsGm |
| NM_005249.5_2061- | AmsAmsCmsGmsTmsAmsCmsAmsGmsAmsAmsAmsTmsGmsGbsGmsAm |
| 2080_as_MOE_L15 | sGmsGmsGm |
| NM_005249.5_2061- | AmsAmsCmsGmsTmsAmsCmsAmsGmsAmsAmsAmsTmsGmsGmsGbsAm |
| 2080_as_MOE_L16 | sGmsGmsGm |
| NM_005249.5_2061- | AmsAmsCmsGmsTmsAmsCmsAmsGmsAmsAmsAmsTmsGmsGmsGmsAb |
| 2080_as_MOE_L17 | sGmsGmsGm |
| NM_005249.5_2061- | AmsAmsCmsGmsTmsAmsCmsAmsGmsAmsAmsAmsTmsGmsGmsGmsAm |
| 2080_as_MOE_L18 | sGbsGmsGm |
| NM_005249.5_2061- | AmsAmsCmsGmsTmsAmsCmsAmsGmsAmsAmsAmsTmsGmsGmsGmsAm |
| 2080_as_MOE_L19 | sGmsGbsGm |
| NM_005249.5_2061- | AmsAmsCmsGmsTmsAmsCmsAmsGmsAmsAmsAmsTmsGmsGmsGmsAm |
| 2080_as_MOE_L20 | sGmsGmsGb |
| NM_005249.5_2061- | AbsAmsCmsGmsTmsAmsCmsAmsGmsAmsAmsAmsTmsGmsGmsGmsAm |
| 2080_as_MOE_L1_L20 | sGmsGmsGb |
| NM_005249.5_2061- | AmsAbsCmsGmsTmsAmsCmsAmsGmsAmsAmsAmsTmsGmsGmsGmsAm |
| 2080_as_MOE_L2_L19 | sGmsGbsGm |
| NM_005249.5_2061- | AmsAmsCbsGmsTmsAmsCmsAmsGmsAmsAmsAmsTmsGmsGmsGmsAm |
| 2080_as_MOE_L3_L18 | sGbsGmsGm |
| NM_005249.5_2061- | AmsAmsCmsGbsTmsAmsCmsAmsGmsAmsAmsAmsTmsGmsGmsGmsAb |
| 2080_as_MOE_L4_L17 | sGmsGmsGm |
| NM_005249.5_2061- | AmsAmsCmsGmsTbsAmsCmsAmsGmsAmsAmsAmsTmsGmsGmsGbsAm |
| 2080_as_MOE_L5_L16 | sGmsGmsGm |
| NM_005249.5_2061- | AmsAmsCmsGmsTmsAbsCmsAmsGmsAmsAmsAmsTmsGmsGbsGmsAm |
| 2080_as_MOE_L6_L15 | sGmsGmsGm |
| NM_005249.5_2061- | AmsAmsCmsGmsTmsAmsCbsAmsGmsAmsAmsAmsTmsGbsGmsGmsAm |
| 2080_as_MOE_L7_L14 | sGmsGmsGm |
| NM_005249.5_2061- | AmsAmsCmsGmsTmsAmsCmsAbsGmsAmsAmsAmsTbsGmsGmsGmsAm |
| 2080_as_MOE_L8_L13 | sGmsGmsGm |
| NM_005249.5_2061- | AmsAmsCmsGmsTmsAmsCmsAmsGbsAmsAmsAbsTmsGmsGmsGmsAm |
| 2080_as_MOE_L9_L12 | sGmsGmsGm |
| NM_005249.5_2061- | AmsAmsCmsGmsTmsAmsCmsAmsGmsAbsAbsAmsTmsGmsGmsGmsAm |
| 2080_as_MOE_L10_L11 | sGmsGmsGm |
| NM_005249.5_2061- | AmsAmCmsGmsTmsAmsCmsAmsGmsAmsAmsAmsTmsGmsGmsGmsAms |
| 2080_as_MOE_PO2 | GmsGmsGm |
| NM_005249.5_2061- | AmsAmsCmGmsTmsAmsCmsAmsGmsAmsAmsAmsTmsGmsGmsGmsAms |
| 2080_as_MOE_PO3 | GmsGmsGm |
| NM_005249.5_2061- | AmsAmsCmsGmTmsAmsCmsAmsGmsAmsAmsAmsTmsGmsGmsGmsAms |
| 2080_as_MOE_PO4 | GmsGmsGm |
| NM_005249.5_2061- | AmsAmsCmsGmsTmAmsCmsAmsGmsAmsAmsAmsTmsGmsGmsGmsAms |
| 2080_as_MOE_PO5 | GmsGmsGm |
| NM_005249.5_2061- | AmsAmsCmsGmsTmsAmCmsAmsGmsAmsAmsAmsTmsGmsGmsGmsAms |
| 2080_as_MOE_PO6 | GmsGmsGm |
| NM_005249.5_2061- | AmsAmsCmsGmsTmsAmsCmAmsGmsAmsAmsAmsTmsGmsGmsGmsAms |
| 2080_as_MOE_PO7 | GmsGmsGm |
| NM_005249.5_2061- | AmsAmsCmsGmsTmsAmsCmsAmGmsAmsAmsAmsTmsGmsGmsGmsAms |
| 2080_as_MOE_PO8 | GmsGmsGm |
| NM_005249.5_2061- | AmsAmsCmsGmsTmsAmsCmsAmsGmAmsAmsAmsTmsGmsGmsGmsAms |
| 2080_as_MOE_PO9 | GmsGmsGm |
| NM_005249.5_2061- | AmsAmsCmsGmsTmsAmsCmsAmsGmsAmAmsAmsTmsGmsGmsGmsAms |
| 2080_as_MOE_PO10 | GmsGmsGm |
| NM_005249.5_2061- | AmsAmsCmsGmsTmsAmsCmsAmsGmsAmsAmAmsTmsGmsGmsGmsAms |
| 2080_as_MOE_PO11 | GmsGmsGm |
| NM_005249.5_2061- | AmsAmsCmsGmsTmsAmsCmsAmsGmsAmsAmsAmTmsGmsGmsGmsAms |
| 2080_as_MOE_PO12 | GmsGmsGm |
| NM_005249.5_2061- | AmsAmsCmsGmsTmsAmsCmsAmsGmsAmsAmsAmsTmGmsGmsGmsAms |
| 2080_as_MOE_PO13 | GmsGmsGm |
| NM_005249.5_2061- | AmsAmsCmsGmsTmsAmsCmsAmsGmsAmsAmsAmsTmsGmGmsGmsAms |
| 2080_as_MOE_PO14 | GmsGmsGm |
| NM_005249.5_2061- | AmsAmsCmsGmsTmsAmsCmsAmsGmsAmsAmsAmsTmsGmsGmGmsAms |
| 2080_as_MOE_PO15 | GmsGmsGm |
| NM_005249.5_2061- | AmsAmsCmsGmsTmsAmsCmsAmsGmsAmsAmsAmsTmsGmsGmsGmAms |
| 2080_as_MOE_PO16 | GmsGmsGm |
| NM_005249.5_2061- | AmsAmsCmsGmsTmsAmsCmsAmsGmsAmsAmsAmsTmsGmsGmsGmsAm |
| 2080_as_MOE_PO17 | GmsGmsGm |
| NM_005249.5_2061- | AmsAmsCmsGmsTmsAmsCmsAmsGmsAmsAmsAmsTmsGmsGmsGmsAm |
| 2080_as_MOE_PO18 | sGmGmsGm |
| NM_005249.5_2061- | AmsAmCmsGmsTmsAmsCmsAmsGmsAmsAmsAmsTmsGmsGmsGmsAms |
| 2080_as_MOE_PO2_ | GmGmsGm |
| PO18 | |
| NM_005249.5_2061- | AmsAmsCmGmsTmsAmsCmsAmsGmsAmsAmsAmsTmsGmsGmsGmsAmG |
| 2080_as_MOE_PO3_ | msGmsGm |
| PO17 | |
| NM_005249.5_2061- | AmsAmsCmsGmTmsAmsCmsAmsGmsAmsAmsAmsTmsGmsGmsGmAmsG |
| 2080_as_MOE_PO4_ | msGmsGm |
| PO16 | |
| NM_005249.5_2061- | AmsAmsCmsGmsTmAmsCmsAmsGmsAmsAmsAmsTmsGmsGmGmsAmsG |
| 2080_as_MOE_PO5_ | msGmsGm |
| PO15 | |
| NM_005249.5_2061- | AmsAmsCmsGmsTmsAmCmsAmsGmsAmsAmsAmsTmsGmGmsGmsAmsG |
| 2080_as_MOE_PO6_ | msGmsGm |
| PO14 | |
| NM_005249.5_2061- | AmsAmsCmsGmsTmsAmsCmAmsGmsAmsAmsAmsTmGmsGmsGmsAmsG |
| 2080_as_MOE_PO7_ | msGmsGm |
| PO13 | |
| NM_005249.5_2061- | AmsAmsCmsGmsTmsAmsCmsAmGmsAmsAmsAmTmsGmsGmsGmsAmsG |
| 2080_as_MOE_PO8_ | msGmsGm |
| PO12 | |
| NM_005249.5_2061- | AmsAmsCmsGmsTmsAmsCmsAmsGmAmsAmAmsTmsGmsGmsGmsAmsG |
| 2080_as_MOE_PO9_ | msGmsGm |
| PO11 | |
| NM_005249.5_2061- | AmsAmsCmsGmsTmsAmsCmsAmsGmAmAmsAmsTmsGmsGmsGmsAmsG |
| 2080_as_MOE_PO9_ | msGmsGm |
| PO10 | |
| NM_005249.5_2061- | AmsAmsCmsGmsTmsAmsCmsAmsGmsAmAmAmsTmsGmsGmsGmsAmsG |
| 2080_as_MOE_PO10_ | msGmsGm |
| PO11 | |
| NM_005249.5_2061- | AmsAmCmsGmsTmsAmsCmsAmsGmsAmsAmsAmsTmsGmsGmsGmsAmG |
| 2080_as_MOE_PO2_ | msGmsGm |
| PO17 | |
| NM_005249.5_2061- | AmsAmsCmGmsTmsAmsCmsAmsGmsAmsAmsAmsTmsGmsGmsGmsAms |
| 2080_as_MOE_PO3_ | GmGmsGm |
| PO18 | |
| NM_005249.5_2061- | AmsAmsCmGmsTmsAmsCmsAmsGmsAmsAmsAmsTmsGmsGmsGmAmsG |
| 2080_as_MOE_PO3_ | msGmsGm |
| PO16 | |
| NM_005249.5_2061- | AmsAmsCmsGmTmsAmsCmsAmsGmsAmsAmsAmsTmsGmsGmsGmsAmG |
| 2080_as_MOE_PO4_ | msGmsGm |
| PO17 | |
| NM_005249.5_2061- | AmsAmsCmsGmTmsAmsCmsAmsGmsAmsAmsAmsTmsGmsGmGmsAmsG |
| 2080_as_MOE_PO4_ | msGmsGm |
| PO15 | |
| NM_005249.5_2061- | AmsAmsCmsGmsTmAmsCmsAmsGmsAmsAmsAmsTmsGmsGmsGmAmsG |
| 2080_as_MOE_PO5_ | msGmsGm |
| PO16 | |

### Transfection of ASOs and FOXG1 Quantification:

### Modulation of FOXG1 Expression by ASOs:

[0091] Table 9 shows the result on FOXG1 expression in HEK293 cells associated with transfection with modified ASOs based on the NM_005249.5_2965-2984_as_MOE sequence. Transfection was performed with ASOs at concentrations of 50 nM and 5 nM. After 24h of incubation with ASOs, medium was removed, the cells were lysed, and QuantiGene detection was used to determine FOXG1 mRNA expression in cells lysates.

[0092] Individual expression values were scaled relative to the GAPDH housekeeping gene, then all normalized to control (mock transfected cell mean value and RLuc-transfected cells). Modulation of GAPDH itself was used as a proxy for cell health, and only oligos that showed <25% reduction in GAPDH (along with FOXG1 upregulation) were selected for follow up.

| | % FOXG1 mRNA relative to GAPDH | | | |
|---|---|---|---|---|
| | Mean | | SD | |
| Name | 50 nM | 5 nM | 50 nM | 5 nM |
| NM_005249.5_2965- | 96.30 | 104.36 | 13.31 | 34.57 |
| 2984_as_MOE | | | | |
| NM_005249.5_2965- | 94.57 | 103.24 | 12.77 | 21.69 |
| 2984_as_MOE_L1 | | | | |
| NM_005249.5_2965- | 174.57 | 104.63 | 24.62 | 17.13 |
| 2984_as_MOE_L2 | | | | |
| NM_005249.5_2965- | 305.57 | 138.77 | 205.37 | 70.35 |
| 2984_as_MOE_L3 | | | | |
| NM_005249.5_2965- | 165.49 | 111.53 | 19.26 | 48.51 |
| 2984_as_MOE_L4 | | | | |
| NM_005249.5_2965- | 155.23 | 106.55 | 7.51 | 11.98 |
| 2984_as_MOE_L5 | | | | |
| NM_005249.5_2965- | 172.94 | 86.23 | 7.15 | 26.72 |
| 2984_as_MOE_L6 | | | | |
| NM_005249.5_2965- | 153.41 | 85.48 | 10.89 | 29.93 |
| 2984_as_MOE_L7 | | | | |
| NM_005249.5_2965- | 171.75 | 99.47 | 21.06 | 18.54 |
| 2984_as_MOE_L8 | | | | |
| NM_005249.5_2965- | 144.31 | 94.13 | 21.11 | 29.20 |
| 2984_as_MOE_L9 | | | | |
| NM_005249.5_2965- | 81.40 | 78.98 | 23.63 | 21.64 |
| 2984_as_MOE_L10 | | | | |
| NM_005249.5_2965- | 106.14 | 93.46 | 58.38 | 32.33 |
| 2984_as_MOE_L11 | | | | |
| NM_005249.5_2965- | 107.28 | 84.56 | 15.52 | 39.55 |
| 2984_as_MOE_L12 | | | | |
| NM_005249.5_2965- | 102.37 | 118.07 | 26.63 | 23.68 |
| 2984_as_MOE_L13 | | | | |
| NM_005249.5_2965- | 105.37 | 121.87 | 29.34 | 35.00 |
| 2984_as_MOE_L14 | | | | |
| NM_005249.5_2965- | 80.31 | 110.72 | 47.12 | 18.43 |
| 2984_as_MOE_L15 | | | | |
| NM_005249.5_2965- | 92.40 | 111.04 | 49.21 | 20.32 |
| 2984_as_MOE_L16 | | | | |
| NM_005249.5_2965- | 119.37 | 104.93 | 51.27 | 21.60 |
| 2984_as_MOE_L17 | | | | |
| NM_005249.5_2965- | 101.65 | 111.92 | 21.19 | 20.77 |
| 2984_as_MOE_L18 | | | | |
| NM_005249.5_2965- | 77.57 | 109.01 | 14.71 | 32.11 |
| 2984_as_MOE_L19 | | | | |
| NM_005249.5_2965- | 126.25 | 93.80 | 25.61 | 17.73 |
| 2984_as_MOE_L20 | | | | |
| NM_005249.5_2965- | 87.70 | 90.26 | 32.15 | 15.77 |
| 2984_as_MOE_L1_L20 | | | | |
| NM_005249.5_2965- | 119.43 | 91.99 | 32.26 | 11.46 |
| 2984_as_MOE_L2_L19 | | | | |
| NM_005249.5_2965- | 97.70 | 69.63 | 23.29 | 11.22 |
| 2984_as_MOE_L3_L18 | | | | |
| NM_005249.5_2965- | 107.44 | 72.44 | 24.31 | 15.88 |
| 2984_as_MOE_L4_L17 | | | | |
| NM_005249.5_2965- | 88.77 | 63.25 | 22.45 | 10.34 |
| 2984_as_MOE_L5_L16 | | | | |
| NM_005249.5_2965- | 91.91 | 65.92 | 17.80 | 11.22 |
| 2984_as_MOE_L6_L15 | | | | |
| NM_005249.5_2965- | 103.07 | 61.81 | 26.97 | 12.12 |
| 2984_as_MOE_L7_L14 | | | | |
| NM_005249.5_2965- | 130.21 | 112.51 | 37.31 | 85.42 |
| 2984_as_MOE_L8_L13 | | | | |
| NM_005249.5_2965- | 104.57 | 88.19 | 18.43 | 9.47 |
| 2984_as_MOE_L9_L12 | | | | |
| NM_005249.5_2965- | 90.16 | 65.04 | 9.46 | 12.99 |
| 2984_as_MOE_L10_L11 | | | | |
| NM_005249.5_2965- | 44.67 | 78.29 | 18.76 | 15.17 |
| 2984_as_MOE_PO2 | | | | |
| NM_005249.5_2965- | 58.40 | 70.31 | 12.11 | 11.89 |
| 2984_as_MOE_PO3 | | | | |
| NM_005249.5_2965- | 66.04 | 80.27 | 16.76 | 13.64 |
| 2984_as_MOE_PO4 | | | | |
| NM_005249.5_2965- | 50.91 | 68.65 | 2.46 | 5.38 |
| 2984_as_MOE_PO5 | | | | |
| NM_005249.5_2965- | 64.91 | 85.92 | 30.36 | 36.54 |
| 2984_as_MOE_PO6 | | | | |
| NM_005249.5_2965- | 51.60 | 74.68 | 11.17 | 21.09 |
| 2984_as_MOE_PO7 | | | | |
| NM_005249.5_2965- | 45.81 | 71.95 | 9.08 | 10.41 |
| 2984_as_MOE_PO8 | | | | |
| NM_005249.5_2965- | 65.85 | 60.25 | 23.93 | 14.03 |
| 2984_as_MOE_PO9 | | | | |
| NM_005249.5_2965- | 50.10 | 79.62 | 11.38 | 8.84 |
| 2984_as_MOE_PO10 | | | | |
| NM_005249.5_2965- | 87.67 | 110.25 | 25.37 | 17.73 |
| 2984_as_MOE_PO11 | | | | |
| NM_005249.5_2965- | 104.43 | 83.65 | 54.51 | 13.37 |
| 2984_as_MOE_PO12 | | | | |
| NM_005249.5_2965- | 101.41 | 104.72 | 23.02 | 22.32 |
| 2984_as_MOE_PO13 | | | | |
| NM_005249.5_2965- | 109.78 | 110.49 | 46.35 | 20.57 |
| 2984_as_MOE_PO14 | | | | |
| NM_005249.5_2965- | 108.32 | 98.27 | 18.15 | 15.32 |
| 2984_as_MOE_PO15 | | | | |
| NM_005249.5_2965- | 107.77 | 94.33 | 30.26 | 22.66 |
| 2984_as_MOE_PO16 | | | | |
| NM_005249.5_2965- | 92.39 | 96.53 | 18.47 | 29.93 |
| 2984_as_MOE_PO17 | | | | |
| NM_005249.5_2965- | 100.93 | 107.18 | 16.59 | 20.93 |
| 2984_as_MOE_PO18 | | | | |
| NM_005249.5_2965- | 128.74 | 185.93 | 27.65 | 153.10 |
| 2984_as_MOE_PO2_PO18 | | | | |
| NM_005249.5_2965- | 104.36 | 97.94 | 24.53 | 16.28 |
| 2984_as_MOE_PO3_PO17 | | | | |
| NM_005249.5_2965- | 116.93 | 123.02 | 48.97 | 22.67 |
| 2984_as_MOE_PO4_PO16 | | | | |
| NM_005249.5_2965- | 88.68 | 91.60 | 22.67 | 20.19 |
| 2984_as_MOE_PO5_PO15 | | | | |
| NM_005249.5_2965- | 101.24 | 100.16 | 25.12 | 10.94 |
| 2984_as_MOE_PO6_PO14 | | | | |
| NM_005249.5_2965- | 115.86 | 101.86 | 35.03 | 20.57 |
| 2984_as_MOE_PO7_PO13 | | | | |
| NM_005249.5_2965- | 106.60 | 104.60 | 32.16 | 11.06 |
| 2984_as_MOE_PO8_PO12 | | | | |
| NM_005249.5_2965- | 86.22 | 103.31 | 26.83 | 4.11 |
| 2984_as_MOE_PO9_PO11 | | | | |
| NM_005249.5_2965- | 75.57 | 130.64 | 21.46 | 40.51 |
| 2984_as_MOE_PO9_PO10 | | | | |
| NM_005249.5_2965- | 94.23 | 85.47 | 18.26 | 11.89 |
| 2984_as_MOE_PO10_PO11 | | | | |
| NM_005249.5_2965- | 125.32 | 111.98 | 40.72 | 35.60 |
| 2984_as_MOE_PO2_PO17 | | | | |
| NM_005249.5_2965- | 113.96 | 100.62 | 42.45 | 20.86 |
| 2984_as_MOE_PO3_PO18 | | | | |
| NM_005249.5_2965- | 79.64 | 144.59 | 8.40 | 10.09 |
| 2984_as_MOE_PO3_PO16 | | | | |
| NM_005249.5_2965- | 77.74 | 164.80 | 10.44 | 42.29 |
| 2984_as_MOE_PO4_PO17 | | | | |
| NM_005249.5_2965- | 77.97 | 103.96 | 5.85 | 25.42 |
| 2984_as_MOE_PO4_PO15 | | | | |
| NM_005249.5_2965- | 135.88 | 84.33 | 18.21 | 4.99 |
| 2984_as_MOE_PO5_PO16 | | | | |

[0093] Table 10 shows the result on FOXG1 expression in HEK293 cells associated with transfection with modified ASOs based on the NM_005249.5_2062-2081_as_MOE sequence. Transfection was performed with ASOs at concentrations of 50 nM and 5 nM. After 24h of incubation with ASOs, medium was removed, the cells were lysed, and QuantiGene detection was used to determine FOXG1 mRNA expression in cells lysates.

[0094] Individual expression values were scaled relative to the GAPDH housekeeping gene, then all normalized to control (mock transfected cell mean value and RLuc-transfected cells).

TABLE 10

| | % FOXG1 mRNA relative to GAPDH | | | |
|---|---|---|---|---|
| | Mean | | SD | |
| Name | 50 nM | 5 nM | 50 nM | 5 nM |
| NM_005249.5_2062- | 159.24 | 113.05 | 21.15 | 5.45 |
| 2081_as_MOE | | | | |
| NM_005249.5_2062- | 119.81 | 116.75 | 28.23 | 12.48 |
| 2081_as_MOE_L1 | | | | |
| NM_005249.5_2062- | 128.17 | 112.92 | 40.67 | 7.37 |
| 2081_as_MOE_L2 | | | | |
| NM_005249.5_2062- | 155.27 | 111.97 | 29.56 | 16.98 |
| 2081_as_MOE_L3 | | | | |
| NM_005249.5_2062- | 144.95 | 114.76 | 31.46 | 7.15 |
| 2081_as_MOE_L4 | | | | |
| NM_005249.5_2062- | 145.70 | 116.87 | 32.98 | 7.76 |
| 2081_as_MOE_L5 | | | | |
| NM_005249.5_2062- | 183.90 | 119.15 | 20.74 | 6.24 |
| 2081_as_MOE_L6 | | | | |
| NM_005249.5_2062- | 137.53 | 116.60 | 21.75 | 7.26 |
| 2081_as_MOE_L7 | | | | |
| NM_005249.5_2062- | 139.81 | 111.17 | 20.70 | 3.79 |
| 2081_as_MOE_L8 | | | | |
| NM_005249.5_2062- | 151.86 | 110.03 | 39.56 | 5.18 |
| 2081_as_MOE_L9 | | | | |
| NM_005249.5_2062- | 130.09 | 109.54 | 10.66 | 11.10 |
| 2081_as_MOE_L10 | | | | |
| NM_005249.5_2062- | 126.83 | 105.19 | 15.65 | 7.12 |
| 2081_as_MOE_L11 | | | | |
| NM_005249.5_2062- | 109.51 | 97.49 | 11.97 | 27.25 |
| 2081_as_MOE_L12 | | | | |
| NM_005249.5_2062- | 145.08 | 107.50 | 4.47 | 6.60 |
| 2081_as_MOE_L13 | | | | |
| NM_005249.5_2062- | 118.08 | 106.84 | 4.44 | 5.49 |
| 2081_as_MOE_L14 | | | | |
| NM_005249.5_2062- | 131.23 | 97.35 | 5.61 | 15.12 |
| 2081_as_MOE_L15 | | | | |
| NM_005249.5_2062- | 157.00 | 113.81 | 17.03 | 12.91 |
| 2081_as_MOE_L16 | | | | |
| NM_005249.5_2062- | 159.70 | 106.43 | 13.45 | 2.60 |
| 2081_as_MOE_L17 | | | | |
| NM_005249.5_2062- | 160.34 | 111.50 | 29.07 | 4.52 |
| 2081_as_MOE_L18 | | | | |
| NM_005249.5_2062- | 155.90 | 99.76 | 10.67 | 2.49 |
| 2081_as_MOE_L19 | | | | |
| NM_005249.5_2062- | 146.15 | 109.82 | 5.34 | 12.11 |
| 2081_as_MOE_L20 | | | | |
| NM_005249.5_2062- | 143.02 | 124.43 | 9.82 | 6.22 |
| 2081_as_MOE_L1_L20 | | | | |
| NM_005249.5_2062- | 153.41 | 110.01 | 7.23 | 11.88 |
| 2081_as_MOE_L2_L19 | | | | |
| NM_005249.5_2062- | 154.52 | 129.16 | 3.47 | 15.29 |
| 2081_as_MOE_L3_L18 | | | | |
| NM_005249.5_2062- | 152.70 | 115.12 | 10.42 | 29.16 |
| 2081_as_MOE_L4_L17 | | | | |
| NM_005249.5_2062- | 510.28 | 103.81 | 393.21 | 14.14 |
| 2081_as_MOE_L5_L16 | | | | |
| NM_005249.5_2062- | 143.76 | 94.85 | 8.67 | 9.44 |
| 2081_as_MOE_L6_L15 | | | | |
| NM_005249.5_2062- | 133.00 | 106.18 | 6.56 | 23.49 |
| 2081_as_MOE_L7_L14 | | | | |
| NM_005249.5_2062- | 130.48 | 90.45 | 35.61 | 18.24 |
| 2081_as_MOE_L8_L13 | | | | |
| NM_005249.5_2062- | 144.25 | 92.53 | 8.30 | 6.85 |
| 2081_as_MOE_L9_L12 | | | | |
| NM_005249.5_2062- | 134.56 | 107.58 | 3.12 | 18.97 |
| 2081_as_MOE_L10_L11 | | | | |
| NM_005249.5_2062- | 144.71 | 95.57 | 6.55 | 8.73 |
| 2081_as_MOE_PO2 | | | | |
| NM_005249.5_2062- | 142.99 | 93.09 | 10.51 | 14.60 |
| 2081_as_MOE_PO3 | | | | |
| NM_005249.5_2062- | 155.94 | 98.95 | 27.73 | 7.45 |
| 2081_as_MOE_PO4 | | | | |
| NM_005249.5_2062- | 150.01 | 91.15 | 4.62 | 15.31 |
| 2081_as_MOE_PO5 | | | | |
| NM_005249.5_2062- | 137.06 | 76.38 | 3.97 | 8.23 |
| 2081_as_MOE_PO6 | | | | |
| NM_005249.5_2062- | 156.20 | 83.41 | 9.28 | 8.42 |
| 2081_as_MOE_PO7 | | | | |
| NM_005249.5_2062- | 145.56 | 87.22 | 4.38 | 13.81 |
| 2081_as_MOE_PO8 | | | | |
| NM_005249.5_2062- | 158.01 | 83.74 | 5.96 | 22.50 |
| 2081_as_MOE_PO9 | | | | |
| NM_005249.5_2062- | 145.82 | 86.76 | 12.92 | 4.98 |
| 2081_as_MOE_PO10 | | | | |
| NM_005249.5_2062- | 138.22 | 80.61 | 20.16 | 17.09 |
| 2081_as_MOE_PO11 | | | | |
| NM_005249.5_2062- | 154.45 | 78.74 | 34.42 | 13.30 |
| 2081_as_MOE_PO12 | | | | |
| NM_005249.5_2062- | 147.59 | 80.87 | 19.87 | 12.47 |
| 2081_as_MOE_PO13 | | | | |
| NM_005249.5_2062- | 121.91 | 84.57 | 18.12 | 19.69 |
| 2081_as_MOE_PO14 | | | | |
| NM_005249.5_2062- | 143.12 | 76.22 | 19.01 | 11.99 |
| 2081_as_MOE_PO15 | | | | |
| NM_005249.5_2062- | 169.88 | 68.84 | 20.27 | 20.45 |
| 2081_as_MOE_PO16 | | | | |
| NM_005249.5_2062- | 167.44 | 74.00 | 7.89 | 19.85 |
| 2081_as_MOE_PO17 | | | | |
| NM_005249.5_2062- | 166.37 | 71.05 | 34.96 | 35.09 |
| 2081_as_MOE_PO18 | | | | |
| NM_005249.5_2062- | 158.91 | 76.14 | 27.55 | 19.02 |
| 2081_as_MOE_PO2_PO18 | | | | |
| NM_005249.5_2062- | 180.45 | 81.37 | 26.10 | 16.95 |
| 2081_as_MOE_PO3_PO17 | | | | |
| NM_005249.5_2062- | 154.05 | 94.45 | 18.23 | 13.33 |
| 2081_as_MOE_PO4_PO16 | | | | |
| NM_005249.5_2062- | 131.95 | 77.98 | 21.27 | 11.78 |
| 2081_as_MOE_PO5_PO15 | | | | |
| NM_005249.5_2062- | 133.57 | 79.93 | 9.61 | 3.86 |
| 2081_as_MOE_PO6_PO14 | | | | |
| NM_005249.5_2062- | 134.41 | 100.29 | 10.93 | 30.35 |
| 2081_as_MOE_PO7_PO13 | | | | |
| NM_005249.5_2062- | 138.80 | 74.29 | 26.24 | 6.33 |
| 2081_as_MOE_PO8_PO12 | | | | |
| NM_005249.5_2062- | 134.11 | 90.60 | 8.02 | 19.41 |
| 2081_as_MOE_PO9_PO11 | | | | |
| NM_005249.5_2062- | 128.20 | 81.20 | 3.46 | 3.86 |
| 2081_as_MOE_PO9_PO10 | | | | |
| NM_005249.5_2062- | 133.03 | 92.81 | 5.32 | 6.06 |
| 2081_as_MOE_PO10_PO11 | | | | |
| NM_005249.5_2062- | 164.23 | 85.12 | 44.37 | 11.68 |
| 2081_as_MOE_PO2_PO17 | | | | |
| NM_005249.5_2062- | 135.11 | 85.28 | 7.32 | 13.65 |
| 2081_as_MOE_PO3_PO18 | | | | |
| NM_005249.5_2062- | 272.94 | 91.46 | 176.00 | 4.12 |
| 2081_as_MOE_PO3_PO16 | | | | |
| NM_005249.5_2062- | 222.94 | 87.63 | 18.43 | 5.91 |
| 2081_as MOE PO4 PO17 | | | | |
| NM_005249.5_2062- | 130.27 | 83.19 | 17.11 | 1.09 |
| 2081_as_MOE_PO4_PO15 | | | | |
| NM_005249.5_2062- | 150.20 | 87.62 | 14.15 | 5.09 |
| 2081_as_MOE_PO5_PO16 | | | | |

[0095] Table 11 shows the result on FOXG1 expression in HEK293 cells associated with transfection with modified ASOs based on the NM_005249.5_2061-2080_as_MOE sequence. Transfection was performed with ASOs at concentrations of 50 nM and 5 nM. After 48h of incubation with ASOs, medium was removed, the cells were lysed, and QuantiGene detection was used to determine FOXG1 mRNA expression in cells lysates.

[0096] Individual expression values were scaled relative to the GAPDH housekeeping gene, then all normalized to control (mock transfected cell mean value and RLuc-transfected cells).

TABLE 11

| | % FOXG1 mRNA relative to GAPDH | | | |
|---|---|---|---|---|
| | Mean | | SD | |
| Name | 50 nM | 5 nM | 50 nM | 5 nM |
| NM_005249.5_2061- | 160.98 | 76.56 | 21.35 | 24.73 |
| 2080_as_MOE | | | | |
| NM_005249.5_2061- | 128.58 | 91.03 | 51.71 | 28.27 |
| 2080_as_MOE_L1 | | | | |
| NM_005249.5_2061- | 174.75 | 77.30 | 48.56 | 19.21 |
| 2080_as_MOE_L2 | | | | |
| NM_005249.5_2061- | 178.60 | 96.28 | 25.26 | 25.90 |
| 2080_as_MOE_L3 | | | | |
| NM_005249.5_2061- | 198.89 | 84.18 | 64.21 | 21.98 |
| 2080_as_MOE_L4 | | | | |
| NM_005249.5_2061- | 181.54 | 96.63 | 54.62 | 19.15 |
| 2080_as_MOE_L5 | | | | |
| NM_005249.5_2061- | 189.32 | 101.55 | 52.95 | 21.43 |
| 2080_as_MOE_L6 | | | | |
| NM_005249.5_2061- | 150.01 | 92.19 | 72.61 | 43.85 |
| 2080_as_MOE_L7 | | | | |
| NM_005249.5_2061- | 151.92 | 97.45 | 24.87 | 36.73 |
| 2080_as_MOE_L8 | | | | |
| NM_005249.5_2061- | 134.81 | 81.01 | 57.31 | 14.02 |
| 2080_as_MOE_L9 | | | | |
| NM_005249.5_2061- | 143.89 | 85.53 | 38.83 | 22.14 |
| 2080_as_MOE_L10 | | | | |
| NM_005249.5_2061- | 90.17 | 88.24 | 23.38 | 13.17 |
| 2080_as_MOE_L11 | | | | |
| NM_005249.5_2061- | 97.76 | 87.83 | 19.78 | 18.84 |
| 2080_as_MOE_L12 | | | | |
| NM_005249.5_2061- | 147.25 | 88.95 | 14.03 | 3.76 |
| 2080_as_MOE_L13 | | | | |
| NM_005249.5_2061- | 98.57 | 89.44 | 23.00 | 16.05 |
| 2080_as_MOE_L14 | | | | |
| NM_005249.5_2061- | 93.71 | 100.75 | 12.90 | 7.14 |
| 2080_as_MOE_L15 | | | | |
| NM_005249.5_2061- | 118.48 | 106.59 | 18.24 | 10.54 |
| 2080_as_MOE_L16 | | | | |
| NM_005249.5_2061- | 126.23 | 89.96 | 24.36 | 25.12 |
| 2080_as_MOE_L17 | | | | |
| NM_005249.5_2061- | 120.67 | 104.14 | 9.20 | 17.17 |
| 2080_as_MOE_L18 | | | | |
| NM_005249.5_2061- | 117.72 | 91.00 | 47.65 | 18.43 |
| 2080_as_MOE_L19 | | | | |
| NM_005249.5_2061- | 98.68 | 88.16 | 23.23 | 16.69 |
| 2080_as_MOE_L20 | | | | |
| NM_005249.5_2061- | 104.79 | 111.05 | 22.62 | 7.20 |
| 2080_as_MOE_L1_L20 | | | | |
| NM_005249.5_2061- | 191.78 | 92.00 | 41.18 | 2.36 |
| 2080_as_MOE_L2_L19 | | | | |
| NM_005249.5_2061- | 177.90 | 133.09 | 18.55 | 28.88 |
| 2080_as_MOE_L3_L18 | | | | |
| NM_005249.5_2061- | 143.67 | 125.62 | 15.36 | 22.39 |
| 2080_as_MOE_L4_L17 | | | | |
| NM_005249.5_2061- | 126.59 | 102.19 | 23.89 | 8.99 |
| 2080_as_MOE_L5_L16 | | | | |
| NM_005249.5_2061- | 158.52 | 114.55 | 9.45 | 16.57 |
| 2080_as_MOE_L6_L15 | | | | |
| NM_005249.5_2061- | 175.84 | 107.29 | 26.61 | 33.91 |
| 2080_as_MOE_L7_L14 | | | | |
| NM_005249.5_2061- | 135.05 | 91.92 | 27.76 | 25.62 |
| 2080_as_MOE_L8_L13 | | | | |
| NM_005249.5_2061- | 112.56 | 92.15 | 20.70 | 26.32 |
| 2080_as_MOE_L9_L12 | | | | |
| NM_005249.5_2061- | 129.40 | 96.95 | 40.92 | 23.91 |
| 2080_as_MOE_L10_L11 | | | | |
| NM_005249.5_2061- | 136.26 | 74.51 | 36.06 | 15.98 |
| 2080_as_MOE_PO2 | | | | |
| NM_005249.5_2061- | 106.48 | 76.44 | 28.23 | 8.72 |
| 2080_as_MOE_PO3 | | | | |
| NM_005249.5_2061- | 123.37 | 111.38 | 43.36 | 10.67 |
| 2080_as_MOE_PO4 | | | | |
| NM_005249.5_2061- | 120.49 | 100.18 | 49.89 | 19.50 |
| 2080_as_MOE_PO5 | | | | |
| NM_005249.5_2061- | 131.44 | 105.00 | 36.09 | 25.88 |
| 2080_as_MOE_PO6 | | | | |
| NM_005249.5_2061- | 158.36 | 87.75 | 32.98 | 34.16 |
| 2080_as_MOE_PO7 | | | | |
| NM_005249.5_2061- | 128.54 | 54.99 | 23.61 | 13.32 |
| 2080_as_MOE_PO8 | | | | |
| NM_005249.5_2061- | 143.94 | 88.76 | 23.37 | 17.56 |
| 2080_as_MOE_PO9 | | | | |
| NM_005249.5_2061- | 117.94 | 102.03 | 24.45 | 15.66 |
| 2080_as_MOE_PO10 | | | | |
| NM_005249.5_2061- | 161.39 | 95.03 | 21.15 | 17.49 |
| 2080_as_MOE_PO11 | | | | |
| NM_005249.5_2061- | 140.19 | 95.34 | 23.50 | 18.54 |
| 2080_as_MOE_PO12 | | | | |
| NM_005249.5_2061- | 135.10 | 89.96 | 14.09 | 20.93 |
| 2080_as_MOE_PO13 | | | | |
| NM_005249.5_2061- | 155.27 | 73.94 | 17.13 | 16.31 |
| 2080_as_MOE_PO14 | | | | |
| NM_005249.5_2061- | 136.56 | 85.21 | 36.56 | 11.95 |
| 2080_as_MOE_PO15 | | | | |
| NM_005249.5_2061- | 172.88 | 97.08 | 25.71 | 21.37 |
| 2080_as_MOE_PO16 | | | | |
| NM_005249.5_2061- | 186.00 | 97.59 | 23.80 | 5.43 |
| 2080_as_MOE_PO17 | | | | |
| NM_005249.5_2061- | 148.35 | 102.08 | 33.07 | 20.03 |
| 2080_as_MOE_PO18 | | | | |
| NM_005249.5_2061- | 179.06 | 100.72 | 29.12 | 13.98 |
| 2080_as_MOE_PO2_PO18 | | | | |
| NM_005249.5_2061- | 172.47 | 74.88 | 34.73 | 30.45 |
| 2080_as_MOE_PO3_PO17 | | | | |
| NM_005249.5_2061- | 120.83 | 85.35 | 17.18 | 7.59 |
| 2080_as_MOE_PO4_PO16 | | | | |
| NM_005249.5_2061- | 132.37 | 83.68 | 22.89 | 12.93 |
| 2080_as_MOE_PO5_PO15 | | | | |
| NM_005249.5_2061- | 146.31 | 85.50 | 12.99 | 23.17 |
| 2080_as_MOE_PO6_PO14 | | | | |
| NM_005249.5_2061- | 131.72 | 89.22 | 15.44 | 20.04 |
| 2080_as_MOE_PO7_PO13 | | | | |
| NM_005249.5_2061- | 150.16 | 80.38 | 18.56 | 6.70 |
| 2080_as_MOE_PO8_PO12 | | | | |
| NM_005249.5_2061- | 139.22 | 68.35 | 11.78 | 27.04 |
| 2080_as_MOE_PO9_PO11 | | | | |
| NM_005249.5_2061- | 169.77 | 98.11 | 39.80 | 21.56 |
| 2080_as_MOE_PO9_PO10 | | | | |
| NM_005249.5_2061- | 155.39 | 109.75 | 12.69 | 20.62 |
| 2080_as_MOE_PO10_PO11 | | | | |
| NM_005249.5_2061- | 188.49 | 83.55 | 20.20 | 12.63 |
| 2080_as_MOE_PO2_PO17 | | | | |
| NM_005249.5_2061- | 193.67 | 91.05 | 77.50 | 9.76 |
| 2080_as_MOE_PO3_PO18 | | | | |
| NM_005249.5_2061- | 156.96 | 74.57 | 34.47 | 6.02 |
| 2080_as_MOE_PO3_PO16 | | | | |
| NM_005249.5_2061- | 148.62 | 70.53 | 56.19 | 19.49 |
| 2080_as_MOE_PO4_PO17 | | | | |
| NM_005249.5_2061- | 141.57 | 65.09 | 20.29 | 14.52 |
| 2080_as_MOE_PO4_PO15 | | | | |
| NM_005249.5_2061- | 134.82 | 86.35 | 16.94 | 11.53 |
| 2080_as_MOE_PO5_PO16 | | | | |

[0097] Table 12 shows data for select modified ASO associated with the modulation of FOXG1 expression in CFF-STTG1 cell lines.

TABLE 12
ASO targets resulting in upregulation
of FOXG1 mRNA in CFF-STTG1 cells

| | % FOXG1 mRNA relative to GAPDH | | | |
|---|---|---|---|---|
| | Mean | | SD | |
| Name | 50 nM | 5 nM | 50 nM | 5 nM |

NM_005249.5_2062-2081_as variants

| | | | | |
|---|---|---|---|---|
| NM_005249.5_2062- | 144.20 | 131.27 | 36.10 | 31.45 |
| 2081_as_MOE | | | | |
| NM_005249.5_2062- | 141.11 | 125.11 | 16.72 | 25.40 |
| 2081_as_MOE_L3 | | | | |
| NM_005249.5_2062- | 149.70 | 124.66 | 12.96 | 12.30 |
| 2081_as_MOE_L6 | | | | |
| NM_005249.5_2062- | 149.76 | 135.73 | 27.86 | 28.16 |
| 2081_as_MOE_L2_L19 | | | | |
| NM_005249.5_2062- | 126.62 | 104.72 | 9.19 | 11.64 |
| 2081_as_MOE_L3_L18 | | | | |
| NM_005249.5_2062- | 131.58 | 134.68 | 11.02 | 14.38 |
| 2081_as_MOE_L4_L17 | | | | |
| NM_005249.5_2062- | 147.41 | 142.21 | 10.91 | 17.30 |
| 2081_as_MOE_L5_L16 | | | | |
| NM_005249.5_2062- | 132.37 | 131.04 | 10.53 | 14.73 |
| 2081_as_MOE_PO3_PO16 | | | | |
| NM_005249.5_2062- | 134.04 | 124.00 | 15.45 | 18.03 |
| 2081_as_MOE_PO4_PO17 | | | | |

NM_005249.5_2965-2984_as variants

| | | | | |
|---|---|---|---|---|
| NM_005249.5_2965- | 75.95 | 126.89 | 10.85 | 14.72 |
| 2984_as_MOE | | | | |
| NM_005249.5_2965- | 110.52 | 128.06 | 27.62 | 24.75 |
| 2984_as_MOE_L3 | | | | |
| NM_005249.5_2965- | 107.07 | 141.12 | 29.76 | 25.44 |
| 2984_as_MOE_L4 | | | | |
| NM_005249.5_2965- | 87.60 | 133.13 | 30.31 | 28.24 |
| 2984_as_MOE_L8 | | | | |
| NM_005249.5_2965- | 88.58 | 141.25 | 18.02 | 21.78 |
| 2984_as_MOE_PO2_PO18 | | | | |

NM_005249.5_2061-2080_as Variants

| | | | | |
|---|---|---|---|---|
| NM_005249.5_2061- | 144.20 | 131.27 | 36.10 | 31.45 |
| 2080_as_MOE | | | | |
| NM_005249.5_2061- | 160.02 | 119.87 | 20.52 | 28.35 |
| 2080_as_MOE_L6 | | | | |
| NM_005249.5_2061- | 153.57 | 114.43 | 16.67 | 18.84 |
| 2080_as_MOE_L2_L19 | | | | |
| NM_005249.5_2061- | 171.07 | 116.95 | 15.72 | 12.93 |
| 2080_as_MOE_L3_L18 | | | | |
| NM_005249.5_2061- | 153.79 | 112.17 | 24.34 | 30.94 |
| 2080_as_MOE_L6_L15 | | | | |
| NM_005249.5_2061- | 156.40 | 127.36 | 27.82 | 33.71 |
| 2080_as_MOE_L7_L14 | | | | |

[0098] While preferred embodiments of the present disclosure have been shown and described herein, it will be obvious to those skilled in the art that such embodiments are provided by way of example only. Numerous variations, changes, and substitutions will now occur to those skilled in the art without departing from the present disclosure. It should be understood that various alternatives to the embodiments of the present disclosure described herein may be employed in practicing the present disclosure. It is intended that the following claims define the scope of the present disclosure and that methods and structures within the scope of these claims and their equivalents be covered thereby.

SEQUENCES

| SEQ ID NO | SEQUENCE |
|---|---|
| 1 | AGCGATCGAGGCGGCTATAG |
| 2 | CAGCGATCGAGGCGGCTATA |
| 3 | ACAGCGATCGAGGCGGCTAT |
| 4 | GACAGCGATCGAGGCGGCTA |
| 5 | AGACAGCGATCGAGGCGGCT |
| 6 | GCAGCAGTCACAGCAGCAGC |
| 7 | CGCAGCAGCAGTCACAGCAG |
| 8 | TCGCAGCAGCAGTCACAGCA |
| 9 | CTCGCAGCAGCAGTCACAGC |
| 10 | TCTCGCAGCAGCAGTCACAG |
| 11 | CTCTCGCAGCAGCAGTCACA |
| 12 | CCTCTCGCAGCAGCAGTCAC |
| 13 | TCCTCTCGCAGCAGCAGTCA |
| 14 | CTCCTCTCGCAGCAGCAGTC |
| 15 | CCTCCTCTCGCAGCAGCAGT |
| 16 | TCCTCCTCTCGCAGCAGCAG |
| 17 | CTCCTCCTCTCGCAGCAGCA |
| 18 | TCCTCCTCCTCTCGCAGCAG |
| 19 | CTCCTCCTCCTCTCGCAGCA |
| 20 | TCCTCCTCCTCCTCTCGCAG |
| 21 | CTCCTCCTCCTCCTCTCGCA |
| 22 | GCTGCTTCCTCCTCCTCCTC |
| 23 | CGCTGCTTCCTCCTCCTCCT |
| 24 | TGTACTTCTTGGTCTCCCCC |
| 25 | CTGTACTTCTTGGTCTCCCC |
| 26 | ACTGTACTTCTTGGTCTCCC |
| 27 | AACTGTACTTCTTGGTCTCC |
| 28 | CAACTGTACTTCTTGGTCTC |
| 29 | CCAACTGTACTTCTTGGTCT |
| 30 | CCCAACTGTACTTCTTGGTC |
| 31 | TCCCAACTGTACTTCTTGGT |
| 32 | CTCCCAACTGTACTTCTTGG |
| 33 | GCTCCCAACTGTACTTCTTG |
| 34 | CGCTCCCAACTGTACTTCTT |
| 35 | TCGCTCCCAACTGTACTTCT |
| 36 | CTCGCTCCCAACTGTACTTC |
| 37 | CCTCGCTCCCAACTGTACTT |
| 38 | CCCTCGCTCCCAACTGTACT |
| 39 | TCCCTCGCTCCCAACTGTAC |
| 40 | CTCCCTCGCTCCCAACTGTA |
| 41 | GCTCCCTCGCTCCCAACTGT |
| 42 | AGCTCCCTCGCTCCCAACTG |
| 43 | AAGCTCCCTCGCTCCCAACT |
| 44 | GAAGCTCCCTCGCTCCCAAC |
| 45 | TGAAGCTCCCTCGCTCCCAA |
| 46 | GTGAAGCTCCCTCGCTCCCA |
| 47 | AAGAAACAACCACCGCCCCG |
| 48 | AAAGAAACAACCACCGCCCC |
| 49 | AAAAGAAACAACCACCGCCC |
| 50 | AAAAAGAAACAACCACCGCC |
| 51 | CCCCTCAGGAATTAGAAAAA |
| 52 | ACCCCTCAGGAATTAGAAAA |
| 53 | CACCCCTCAGGAATTAGAAA |
| 54 | CCACCCCTCAGGAATTAGAA |
| 55 | ACCACCCCTCAGGAATTAGA |
| 56 | AACCACCCCTCAGGAATTAG |
| 57 | CAACCACCCCTCAGGAATTA |
| 58 | GCAACCACCCCTCAGGAATT |
| 59 | AGCAACCACCCCTCAGGAAT |
| 60 | CAGCAACCACCCCTCAGGAA |
| 61 | GCAGCAACCACCCCTCAGGA |
| 62 | AAGCAGCAACCACCCCTCAG |
| 63 | AAAGCAGCAACCACCCCTCA |
| 64 | AAAAGCAGCAACCACCCCTC |
| 65 | CAAAAGCAGCAACCACCCCT |
| 66 | GCAAAAGCAGCAACCACCCC |
| 67 | AGCAAAAGCAGCAACCACCC |
| 68 | TAGCAAAAGCAGCAACCACC |
| 69 | GTAGCAAAAGCAGCAACCAC |
| 70 | TGTAGCAAAAGCAGCAACCA |
| 71 | ATGTAGCAAAAGCAGCAACC |
| 72 | CATGTAGCAAAAGCAGCAAC |
| 73 | TCATGTAGCAAAAGCAGCAA |
| 74 | GTCATGTAGCAAAAGCAGCA |
| 75 | AGTCATGTAGCAAAAGCAGC |
| 76 | AAGTCATGTAGCAAAAGCAG |
| 77 | CAAGTCATGTAGCAAAAGCA |
| 78 | GCAAGTCATGTAGCAAAAGC |
| 79 | GGCAAGTCATGTAGCAAAAG |
| 80 | TGGCAAGTCATGTAGCAAAA |
| 81 | CTGGCAAGTCATGTAGCAAA |
| 82 | GCTGGCAAGTCATGTAGCAA |
| 83 | CGCTGGCAAGTCATGTAGCA |
| 84 | GCGCTGGCAAGTCATGTAGC |
| 85 | TCACTTACAGTCTGGTCCCA |
| 86 | TTCACTTACAGTCTGGTCCC |
| 87 | ACGTTCACTTACAGTCTGGT |
| 88 | GTGTAAAACGTTCACTTACA |
| 89 | TGTGTAAAACGTTCACTTAC |
| 90 | GTGTGTAAAACGTTCACTTA |
| 91 | TGTGTGTAAAACGTTCACTT |
| 92 | TGCAAATGTGTGTAAAACGT |
| 93 | ATGCAAATGTGTGTAAAACG |
| 94 | AATGCAAATGTGTGTAAAAC |
| 95 | CAATGCAAATGTGTGTAAAA |
| 96 | TTTACAATGCAAATGTGTGT |
| 97 | AAATACCTGGACTTATTTTT |
| 98 | AAAATACCTGGACTTATTTT |
| 99 | AAAAATACCTGGACTTATTT |
| 100 | AACGTACAGAAATGGGAGGG |
| 101 | AAACGTACAGAAATGGGAGG |
| 102 | CAAACGTACAGAAATGGGAG |
| 103 | ACAAACGTACAGAAATGGGA |
| 104 | AACAAACGTACAGAAATGGG |
| 105 | GAACAAACGTACAGAAATGG |
| 106 | CACTCCACACCTTGTTAGAA |
| 107 | ACACTCCACACCTTGTTAGA |
| 108 | GACACTCCACACCTTGTTAG |
| 109 | TCGCTGACACTCCACACCTT |
| 110 | GTATTCTCCCCACATTGCAC |
| 111 | TGTATTCTCCCCACATTGCA |
| 112 | ATGTATTCTCCCCACATTGC |
| 113 | ACAATGTATTCTCCCCACAT |
| 114 | TTGACTTCCAAACCTTATAT |
| 115 | TTTGACTTCCAAACCTTATA |
| 116 | CTACTATAATTTGACTTCCA |
| 117 | TCTACTATAATTTGACTTCC |
| 118 | TTCTACTATAATTTGACTTC |
| 119 | CATTCTACTATAATTTGACT |
| 120 | ACATTCTACTATAATTTGAC |
| 121 | GATACACATTCTACTATAAT |
| 122 | AGATACACATTCTACTATAA |
| 123 | TAGATACACATTCTACTATA |
| 124 | TTAGATACACATTCTACTAT |
| 125 | TTTAGATACACATTCTACTA |
| 126 | ATTTAGATACACATTCTACT |
| 127 | TATTTAGATACACATTCTAC |
| 128 | CTATTTAGATACACATTCTA |
| 129 | CACTATTTAGATACACATTC |
| 130 | GTCACTATTTAGATACACAT |
| 131 | AGTCACTATTTAGATACACA |
| 132 | CAGTCACTATTTAGATACAC |
| 133 | AGCAGTCACTATTTAGATAC |
| 134 | AAGCAGTCACTATTTAGATA |
| 135 | AAAGCAGTCACTATTTAGAT |
| 136 | CAAAGCAGTCACTATTTAGA |
| 137 | GCAAAGCAGTCACTATTTAG |
| 138 | GGCAAAGCAGTCACTATTTA |
| 139 | TGGCAAAGCAGTCACTATTT |
| 140 | AATGGCAAAGCAGTCACTAT |
| 141 | AAATGGCAAAGCAGTCACTA |
| 142 | GAAATGGCAAAGCAGTCACT |
| 143 | AATGAAATGGCAAAGCAGTC |
| 144 | AGGTTTGAATGAAATGGCAA |
| 145 | CAGGTTTGAATGAAATGGCA |
| 146 | TCAGGTTTGAATGAAATGGC |
| 147 | GTCAGGTTTGAATGAAATGG |
| 148 | CTTGTCAGGTTTGAATGAAA |
| 149 | CTTAGAGATAGACTTGTCAG |
| 150 | TCTTAGAGATAGACTTGTCA |
| 151 | CTCTTAGAGATAGACTTGTC |
| 152 | GCTCTTAGAGATAGACTTGT |
| 153 | GGCTCTTAGAGATAGACTTG |
| 154 | CGGCTCTTAGAGATAGACTT |
| 155 | GCGGCTCTTAGAGATAGACT |
| 156 | TGGCGGCTCTTAGAGATAGA |
| 157 | TCTGGCGGCTCTTAGAGATA |
| 158 | ATCTGGCGGCTCTTAGAGAT |
| 159 | AATCTGGCGGCTCTTAGAGA |
| 160 | TACTGCACACATGGAAATCT |
| 161 | ATACTGCACACATGGAAATC |
| 162 | AATACTGCACACATGGAAAT |
| 163 | ATAATACTGCACACATGGAA |
| 164 | CTTATAATACTGCACACATG |
| 165 | AACTTATAATACTGCACACA |
| 166 | TAACTTATAATACTGCACAC |
| 167 | ATAACTTATAATACTGCACA |
| 168 | GATAACTTATAATACTGCAC |
| 169 | TGATAACTTATAATACTGCA |
| 170 | ATGATAACTTATAATACTGC |
| 171 | GTTCCATGATAACTTATAAT |
| 172 | AGTTCCATGATAACTTATAA |
| 173 | TAGTTCCATGATAACTTATA |
| 174 | ATAGTTCCATGATAACTTAT |
| 175 | TATAGTTCCATGATAACTTA |
| 176 | TCTGCGTCCACCATATAGTT |
| 175 | GTCTGCGTCCACCATATAGT |
| 178 | GGTCTGCGTCCACCATATAG |
| 179 | AGGTCTGCGTCCACCATATA |
| 180 | AAGGTCTGCGTCCACCATAT |
| 181 | TTCTCAAGGTCTGCGTCCAC |
| 182 | GTTCTCAAGGTCTGCGTCCA |
| 183 | TGTTCTCAAGGTCTGCGTCC |
| 184 | TTGTTCTCAAGGTCTGCGTC |
| 185 | GTTGTTCTCAAGGTCTGCGT |
| 186 | GGTTGTTCTCAAGGTCTGCG |
| 187 | AGGTTGTTCTCAAGGTCTGC |
| 188 | TAGGTTGTTCTCAAGGTCTG |
| 189 | TTAGGTTGTTCTCAAGGTCT |
| 190 | TTTAGGTTGTTCTCAAGGTC |
| 191 | AATTTAGGTTGTTCTCAAGG |
| 192 | CCCATAATTTAGGTTGTTCT |
| 193 | CCCCATAATTTAGGTTGTTC |
| 194 | TCCCCATAATTTAGGTTGTT |
| 195 | CTCCCCATAATTTAGGTTGT |
| 196 | TCTCCCCATAATTTAGGTTG |
| 197 | AAATTCTCCCCATAATTTAG |
| 198 | CAATAAATGGCCAAAATAAT |
| 199 | TCTTTGGTCTAAAAGTAAAC |
| 200 | ATCTTTGGTCTAAAAGTAAA |
| 201 | AATCTTTGGTCTAAAAGTAA |
| 202 | CAATCTTTGGTCTAAAAGTA |
| 203 | TTTCTAGAACCCAATCTTTG |
| 204 | CATTTTCTAGAACCCAATCT |
| 205 | GCATTTTCTAGAACCCAATC |
| 206 | TGCATTTTCTAGAACCCAAT |
| 207 | GTGCATTTTCTAGAACCCAA |
| 208 | AGTGCATTTTCTAGAACCCA |
| 209 | CAAGTGCATTTTCTAGAACC |
| 210 | CCAAGTGCATTTTCTAGAAC |
| 211 | ACCAAGTGCATTTTCTAGAA |
| 212 | TACCAAGTGCATTTTCTAGA |
| 213 | ATACCAAGTGCATTTTCTAG |
| 214 | TATACCAAGTGCATTTTCTA |
| 215 | GTATACCAAGTGCATTTTCT |
| 216 | AGTATACCAAGTGCATTTTC |
| 217 | TAGTATACCAAGTGCATTTT |
| 218 | TTAGTATACCAAGTGCATTT |
| 219 | ACTTAGTATACCAAGTGCAT |
| 220 | TACTTAGTATACCAAGTGCA |
| 221 | ATACTTAGTATACCAAGTGC |
| 222 | AATACTTAGTATACCAAGTG |
| 223 | GTTTTAATACTTAGTATACC |
| 224 | AGTGTTGCCAACTGAAACAA |
| 225 | CAATTGAATGGGCAGTGTTG |
| 226 | TCAATTGAATGGGCAGTGTT |
| 227 | TTCAATTGAATGGGCAGTGT |
| 228 | TGAAGGCAATCGTTAATTTT |
| 229 | CTGAAGGCAATCGTTAATTT |
| 230 | ACTGAAGGCAATCGTTAATT |
| 231 | AACTGAAGGCAATCGTTAAT |
| 232 | AAACTGAAGGCAATCGTTAA |
| 233 | CAAACTGAAGGCAATCGTTA |
| 234 | ACAAACTGAAGGCAATCGTT |
| 235 | ACACAAACTGAAGGCAATCG |
| 236 | GTGACCACATACATCAAAAT |
| 237 | TTAGTGACCACATACATCAA |
| 238 | TTTACCTATAAGTACAATAG |
| 239 | GTTTACCTATAAGTACAATA |
| 240 | GGTTTACCTATAAGTACAAT |
| 241 | ACATATTTGCAAGGTTTACC |
| 242 | TACATATTTGCAAGGTTTAC |
| 243 | TTACATATTTGCAAGGTTTA |
| 244 | GTTACATATTTGCAAGGTTT |
| 245 | GGTTACATATTTGCAAGGTT |
| 246 | AGGTTACATATTTGCAAGGT |
| 247 | CAGGTTACATATTTGCAAGG |
| 248 | ACAGGTTACATATTTGCAAG |
| 249 | ACACAGGTTACATATTTGCA |
| 250 | AACACAGGTTACATATTTGC |
| 251 | GCAACACAGGTTACATATTT |
| 252 | GCGCAACACAGGTTACATAT |
| 253 | TGCGCAACACAGGTTACATA |
| 254 | TTGCGCAACACAGGTTACAT |
| 255 | TTTGCGCAACACAGGTTACA |
| 256 | CATTTGCGCAACACAGGTTA |
| 257 | ACTCAAATTTATGCGGCATT |
| 258 | ATCACTCAAATTTATGCGGC |
| 259 | ACATTAACAATCACTCAAAT |
| 260 | CAACATTAACAATCACTCAA |
| 261 | ACAACATTAACAATCACTCA |
| 262 | GACAACATTAACAATCACTC |
| 263 | AGACAACATTAACAATCACT |
| 264 | ACCACAGTATCACAATCAAG |
| 265 | GACCACAGTATCACAATCAA |
| 266 | TGACCACAGTATCACAATCA |
| 267 | ATGACCACAGTATCACAATC |
| 268 | CATATGACCACAGTATCACA |
| 269 | GCATATGACCACAGTATCAC |
| 270 | GACAAACACGGGCATATGAC |
| 271 | TGACAAACACGGGCATATGA |
| 272 | GTTCATAGTAAACATTTTTG |
| 273 | GTGTTCATAGTAAACATTTT |
| 274 | TGTGTTCATAGTAAACATTT |
| 275 | TCTGTGTGTTCATAGTAAAC |
| 276 | TTCTGTGTGTTCATAGTAAA |
| 277 | TATTTCTGTGTGTTCATAGT |
| 278 | GATATATATGAATTTAGCCT |
| 279 | AGATATATATGAATTTAGCC |
| 280 | AGACAAAAGTATCAAGATAT |
| 281 | AGTTGATTGGTCTTTAAAAA |
| 282 | CCCTATAAGTTGATTGGTCT |
| 283 | AAAAAGCCTTTGAATTCCCT |
| 284 | TAAATTTTAGTTTGGCTGAA |
| 285 | TTAAATTTTAGTTTGGCTGA |
| 286 | TTTAAATTTTAGTTTGGCTG |
| 287 | GTTTAAATTTTAGTTTGGCT |
| 288 | TTAGAGTCAGTTCAAATTAA |
| 289 | TTTAGAGTCAGTTCAAATTA |
| 290 | TTTTAGAGTCAGTTCAAATT |
| 291 | TCATTTTTAGAGTCAGTTCA |
| 292 | TTCATTTTTAGAGTCAGTTC |
| 293 | GTTCACAAAGGGAAAAATAC |
| 294 | CTGCTCCTTGTAAAATTTGT |
| 295 | GCTGCTCCTTGTAAAATTTG |
| 296 | TGTTTATTAAATAGGCTGCT |
| 297 | GTGTTTATTAAATAGGCTGC |
| 298 | TAGTGTTTATTAAATAGGCT |
| 299 | CTAGTGTTTATTAAATAGGC |
| 300 | GCTAGTGTTTATTAAATAGG |
| 301 | AAAGCCTATACTTTGTTTAA |
| 302 | TCAGCTGAAAAGCCTATACT |
| 303 | ATCAGCTGAAAAGCCTATAC |
| 304 | TATCAGCTGAAAAGCCTATA |
| 305 | GTATCAGCTGAAAAGCCTAT |
| 306 | GGTATCAGCTGAAAAGCCTA |
| 307 | TGTATATCCACAGAAACTTA |
| 308 | CTTTTTGCTGTATATCCACA |
| 309 | TCTTTTTGCTGTATATCCAC |
| 310 | CTCTTTTTGCTGTATATCCA |
| 311 | TCTCTTTTTGCTGTATATCC |
| 312 | ATCTCTTTTTGCTGTATATC |
| 313 | ATATCTCTTTTTGCTGTATA |
| 314 | TATATCTCTTTTTGCTGTAT |
| 315 | TTATATCTCTTTTTGCTGTA |
| 316 | ATTATATCTCTTTTTGCTGT |
| 317 | AATTATATCTCTTTTTGCTG |
| 318 | GGTAAAGAGCTATGCACAGA |
| 319 | GGGTAAAGAGCTATGCACAG |
| 320 | AGGGTAAAGAGCTATGCACA |
| 321 | CAGGGTAAAGAGCTATGCAC |
| 322 | ACAGGGTAAAGAGCTATGCA |
| 323 | AACACAGGGTAAAGAGCTAT |
| 324 | GCCAAGCTCTATTAACAATA |
| 325 | TGCCAAGCTCTATTAACAAT |
| 326 | TTGCCAAGCTCTATTAACAA |
| 327 | TTTGCCAAGCTCTATTAACA |
| 328 | ATAATTTGCCAAGCTCTATT |
| 329 | TATAATTTGCCAAGCTCTAT |
| 330 | TTATAATTTGCCAAGCTCTA |
| 331 | ATTTATAATTTGCCAAGCTC |
| 332 | TATTTATAATTTGCCAAGCT |
| 333 | TTATTTATAATTTGCCAAGC |
| 334 | ACTTCTATCTAACCATATAC |
| 335 | GTCACTTCTATCTAACCATA |
| 336 | AGTCACTTCTATCTAACCAT |
| 337 | TAGTCACTTCTATCTAACCA |
| 338 | ATAGTCACTTCTATCTAACC |
| 339 | TATAGTCACTTCTATCTAAC |
| 340 | TTATAGTCACTTCTATCTAA |
| 341 | ATTATAGTCACTTCTATCTA |
| 342 | CATTATAGTCACTTCTATCT |
| 343 | GCATTATAGTCACTTCTATC |
| 344 | TGCATTATAGTCACTTCTAT |
| 345 | GTGCATTATAGTCACTTCTA |
| 346 | GGGCTCTGTGTGTCTATATA |
| 347 | AGGGCTCTGTGTGTCTATAT |
| 348 | AAGGGCTCTGTGTGTCTATA |
| 349 | GAAGGGCTCTGTGTGTCTAT |
| 350 | TGAAGGGCTCTGTGTGTCTA |
| 351 | ACTGAAGGGCTCTGTGTGTC |
| 352 | GAACTGAAGGGCTCTGTGTG |
| 353 | TGAACTGAAGGGCTCTGTGT |
| 354 | CTGAACTGAAGGGCTCTGTG |
| 355 | CCTGAACTGAAGGGCTCTGT |
| 356 | AAATTGTACCTGAACTGAAG |
| 357 | CAAATTGTACCTGAACTGAA |
| 358 | GCAAATTGTACCTGAACTGA |
| 359 | CGCAAATTGTACCTGAACTG |
| 360 | GCGCAAATTGTACCTGAACT |
| 361 | ATAAATGCTGACTTAGAAAG |
| 362 | AAATAAATGCTGACTTAGAA |
| 363 | AAAATAAATGCTGACTTAGA |
| 364 | GTGGGTAAACAGCCACAAAA |
| 365 | TGTGGGTAAACAGCCACAAA |
| 366 | ATTGTGGGTAAACAGCCACA |
| 367 | CATTGTGGGTAAACAGCCAC |
| 368 | TCATTGTGGGTAAACAGCCA |
| 369 | TTCATTGTGGGTAAACAGCC |
| 370 | TTTCATTGTGGGTAAACAGC |
| 371 | CTTTCATTGTGGGTAAACAG |
| 372 | TCTTTCATTGTGGGTAAACA |
| 373 | CTCTTTCATTGTGGGTAAAC |
| 374 | ACTCTTTCATTGTGGGTAAA |
| 375 | AACTCTTTCATTGTGGGTAA |
| 376 | GAACTCTTTCATTGTGGGTA |
| 377 | AGAACTCTTTCATTGTGGGT |
| 378 | TAGAACTCTTTCATTGTGGG |
| 379 | TTAGAACTCTTTCATTGTGG |
| 380 | CTTTATTAGAACTCTTTCAT |
| 381 | ACATCTTTATTAGAACTCTT |
| 382 | GCACATCTTTATTAGAACTC |
| 383 | CAGCACATCTTTATTAGAAC |
| 384 | TCAGCACATCTTTATTAGAA |

The application's sequence listing, which the Patent Office published only in electronic form, follows.

SEQUENCE LISTING (614 sequences)

SEQ ID NO: 1 - DNA, 20 bp, synthetic construct
  source 1..20: mol_type = other DNA
agcgatcgaggcggctatag

SEQ ID NO: 2 - DNA, 20 bp, synthetic construct
  source 1..20: mol_type = other DNA
cagcgatcgaggcggctata

SEQ ID NO: 3 - DNA, 20 bp, synthetic construct
  source 1..20: mol_type = other DNA
acagcgatcgaggcggctat

SEQ ID NO: 4 - DNA, 20 bp, synthetic construct
  source 1..20: mol_type = other DNA
gacagcgatcgaggcggcta

SEQ ID NO: 5 - DNA, 20 bp, synthetic construct
  source 1..20: mol_type = other DNA
agacagcgatcgaggcggct

SEQ ID NO: 6 - DNA, 20 bp, synthetic construct
  source 1..20: mol_type = other DNA
gcagcagtcacagcagcagc

SEQ ID NO: 7 - DNA, 20 bp, synthetic construct
  source 1..20: mol_type = other DNA
cgcagcagcagtcacagcag

SEQ ID NO: 8 - DNA, 20 bp, synthetic construct
  source 1..20: mol_type = other DNA
tcgcagcagcagtcacagca

SEQ ID NO: 9 - DNA, 20 bp, synthetic construct
  source 1..20: mol_type = other DNA
ctcgcagcagcagtcacagc

SEQ ID NO: 10 - DNA, 20 bp, synthetic construct
  source 1..20: mol_type = other DNA
tctcgcagcagcagtcacag

SEQ ID NO: 11 - DNA, 20 bp, synthetic construct
  source 1..20: mol_type = other DNA
ctctcgcagcagcagtcaca

SEQ ID NO: 12 - DNA, 20 bp, synthetic construct
  source 1..20: mol_type = other DNA
cctctcgcagcagcagtcac

SEQ ID NO: 13 - DNA, 20 bp, synthetic construct
  source 1..20: mol_type = other DNA
tcctctcgcagcagcagtca

SEQ ID NO: 14 - DNA, 20 bp, synthetic construct
  source 1..20: mol_type = other DNA
ctcctctcgcagcagcagtc

SEQ ID NO: 15 - DNA, 20 bp, synthetic construct
  source 1..20: mol_type = other DNA
cctcctctcgcagcagcagt

SEQ ID NO: 16 - DNA, 20 bp, synthetic construct
  source 1..20: mol_type = other DNA
tcctcctctcgcagcagcag

SEQ ID NO: 17 - DNA, 20 bp, synthetic construct
  source 1..20: mol_type = other DNA
ctcctcctctcgcagcagca

SEQ ID NO: 18 - DNA, 20 bp, synthetic construct
  source 1..20: mol_type = other DNA
tcctcctcctctcgcagcag

SEQ ID NO: 19 - DNA, 20 bp, synthetic construct
  source 1..20: mol_type = other DNA
ctcctcctcctctcgcagca

SEQ ID NO: 20 - DNA, 20 bp, synthetic construct
  source 1..20: mol_type = other DNA
tcctcctcctcctctcgcag

SEQ ID NO: 21 - DNA, 20 bp, synthetic construct
  source 1..20: mol_type = other DNA
ctcctcctcctcctctcgca

SEQ ID NO: 22 - DNA, 20 bp, synthetic construct
  source 1..20: mol_type = other DNA
gctgcttcctcctcctcctc

SEQ ID NO: 23 - DNA, 20 bp, synthetic construct
  source 1..20: mol_type = other DNA
cgctgcttcctcctcctcct

SEQ ID NO: 24 - DNA, 20 bp, synthetic construct
  source 1..20: mol_type = other DNA
tgtacttcttggtctccccc

SEQ ID NO: 25 - DNA, 20 bp, synthetic construct
  source 1..20: mol_type = other DNA
ctgtacttcttggtctcccc

SEQ ID NO: 26 - DNA, 20 bp, synthetic construct
  source 1..20: mol_type = other DNA
actgtacttcttggtctccc

SEQ ID NO: 27 - DNA, 20 bp, synthetic construct
  source 1..20: mol_type = other DNA
aactgtacttcttggtctcc

SEQ ID NO: 28 - DNA, 20 bp, synthetic construct
  source 1..20: mol_type = other DNA
caactgtacttcttggtctc

SEQ ID NO: 29 - DNA, 20 bp, synthetic construct
  source 1..20: mol_type = other DNA
ccaactgtacttcttggtct

SEQ ID NO: 30 - DNA, 20 bp, synthetic construct
  source 1..20: mol_type = other DNA
cccaactgtacttcttggtc

SEQ ID NO: 31 - DNA, 20 bp, synthetic construct
  source 1..20: mol_type = other DNA
tcccaactgtacttcttggt

SEQ ID NO: 32 - DNA, 20 bp, synthetic construct
  source 1..20: mol_type = other DNA
ctcccaactgtacttcttgg

SEQ ID NO: 33 - DNA, 20 bp, synthetic construct
  source 1..20: mol_type = other DNA
gctcccaactgtacttcttg

SEQ ID NO: 34 - DNA, 20 bp, synthetic construct
  source 1..20: mol_type = other DNA
cgctcccaactgtacttctt

SEQ ID NO: 35 - DNA, 20 bp, synthetic construct
  source 1..20: mol_type = other DNA
tcgctcccaactgtacttct

SEQ ID NO: 36 - DNA, 20 bp, synthetic construct
  source 1..20: mol_type = other DNA
ctcgctcccaactgtacttc

SEQ ID NO: 37 - DNA, 20 bp, synthetic construct
  source 1..20: mol_type = other DNA
cctcgctcccaactgtactt

SEQ ID NO: 38 - DNA, 20 bp, synthetic construct
  source 1..20: mol_type = other DNA
ccctcgctcccaactgtact

SEQ ID NO: 39 - DNA, 20 bp, synthetic construct
  source 1..20: mol_type = other DNA
tccctcgctcccaactgtac

SEQ ID NO: 40 - DNA, 20 bp, synthetic construct
  source 1..20: mol_type = other DNA
ctccctcgctcccaactgta

SEQ ID NO: 41 - DNA, 20 bp, synthetic construct
  source 1..20: mol_type = other DNA
gctccctcgctcccaactgt

SEQ ID NO: 42 - DNA, 20 bp, synthetic construct
  source 1..20: mol_type = other DNA
agctccctcgctcccaactg

SEQ ID NO: 43 - DNA, 20 bp, synthetic construct
  source 1..20: mol_type = other DNA
aagctccctcgctcccaact

SEQ ID NO: 44 - DNA, 20 bp, synthetic construct
  source 1..20: mol_type = other DNA
gaagctccctcgctcccaac

SEQ ID NO: 45 - DNA, 20 bp, synthetic construct
  source 1..20: mol_type = other DNA
tgaagctccctcgctcccaa

SEQ ID NO: 46 - DNA, 20 bp, synthetic construct
  source 1..20: mol_type = other DNA
gtgaagctccctcgctccca

SEQ ID NO: 47 - DNA, 20 bp, synthetic construct
  source 1..20: mol_type = other DNA
aagaaacaaccaccgccccg

SEQ ID NO: 48 - DNA, 20 bp, synthetic construct
  source 1..20: mol_type = other DNA
aaagaaacaaccaccgcccc

SEQ ID NO: 49 - DNA, 20 bp, synthetic construct
  source 1..20: mol_type = other DNA
aaaagaaacaaccaccgccc

SEQ ID NO: 50 - DNA, 20 bp, synthetic construct
  source 1..20: mol_type = other DNA
aaaaagaaacaaccaccgcc

SEQ ID NO: 51 - DNA, 20 bp, synthetic construct
  source 1..20: mol_type = other DNA
cccctcaggaattagaaaaa

SEQ ID NO: 52 - DNA, 20 bp, synthetic construct
  source 1..20: mol_type = other DNA
acccctcaggaattagaaaa

SEQ ID NO: 53 - DNA, 20 bp, synthetic construct
  source 1..20: mol_type = other DNA
cacccctcaggaattagaaa

SEQ ID NO: 54 - DNA, 20 bp, synthetic construct
  source 1..20: mol_type = other DNA
ccacccctcaggaattagaa

SEQ ID NO: 55 - DNA, 20 bp, synthetic construct
  source 1..20: mol_type = other DNA
accacccctcaggaattaga

SEQ ID NO: 56 - DNA, 20 bp, synthetic construct
  source 1..20: mol_type = other DNA
aaccacccctcaggaattag

SEQ ID NO: 57 - DNA, 20 bp, synthetic construct
  source 1..20: mol_type = other DNA
caaccacccctcaggaatta

SEQ ID NO: 58 - DNA, 20 bp, synthetic construct
  source 1..20: mol_type = other DNA
gcaaccacccctcaggaatt

SEQ ID NO: 59 - DNA, 20 bp, synthetic construct
  source 1..20: mol_type = other DNA
agcaaccacccctcaggaat

SEQ ID NO: 60 - DNA, 20 bp, synthetic construct
  source 1..20: mol_type = other DNA
cagcaaccacccctcaggaa

SEQ ID NO: 61 - DNA, 20 bp, synthetic construct
  source 1..20: mol_type = other DNA
gcagcaaccacccctcagga

SEQ ID NO: 62 - DNA, 20 bp, synthetic construct
  source 1..20: mol_type = other DNA
aagcagcaaccacccctcag

SEQ ID NO: 63 - DNA, 20 bp, synthetic construct
  source 1..20: mol_type = other DNA
aaagcagcaaccacccctca

SEQ ID NO: 64 - DNA, 20 bp, synthetic construct
  source 1..20: mol_type = other DNA
aaaagcagcaaccacccctc

SEQ ID NO: 65 - DNA, 20 bp, synthetic construct
  source 1..20: mol_type = other DNA
caaaagcagcaaccacccct

SEQ ID NO: 66 - DNA, 20 bp, synthetic construct
  source 1..20: mol_type = other DNA
gcaaaagcagcaaccacccc

SEQ ID NO: 67 - DNA, 20 bp, synthetic construct
  source 1..20: mol_type = other DNA
agcaaaagcagcaaccaccc

SEQ ID NO: 68 - DNA, 20 bp, synthetic construct
  source 1..20: mol_type = other DNA
tagcaaaagcagcaaccacc

SEQ ID NO: 69 - DNA, 20 bp, synthetic construct
  source 1..20: mol_type = other DNA
gtagcaaaagcagcaaccac

SEQ ID NO: 70 - DNA, 20 bp, synthetic construct
  source 1..20: mol_type = other DNA
tgtagcaaaagcagcaacca

SEQ ID NO: 71 - DNA, 20 bp, synthetic construct
  source 1..20: mol_type = other DNA
atgtagcaaaagcagcaacc

SEQ ID NO: 72 - DNA, 20 bp, synthetic construct
  source 1..20: mol_type = other DNA
catgtagcaaaagcagcaac

SEQ ID NO: 73 - DNA, 20 bp, synthetic construct
  source 1..20: mol_type = other DNA
tcatgtagcaaaagcagcaa

SEQ ID NO: 74 - DNA, 20 bp, synthetic construct
  source 1..20: mol_type = other DNA
gtcatgtagcaaaagcagca

SEQ ID NO: 75 - DNA, 20 bp, synthetic construct
  source 1..20: mol_type = other DNA
agtcatgtagcaaaagcagc

SEQ ID NO: 76 - DNA, 20 bp, synthetic construct
  source 1..20: mol_type = other DNA
aagtcatgtagcaaaagcag

SEQ ID NO: 77 - DNA, 20 bp, synthetic construct
  source 1..20: mol_type = other DNA
caagtcatgtagcaaaagca

SEQ ID NO: 78 - DNA, 20 bp, synthetic construct
  source 1..20: mol_type = other DNA
gcaagtcatgtagcaaaagc

SEQ ID NO: 79 - DNA, 20 bp, synthetic construct
  source 1..20: mol_type = other DNA
ggcaagtcatgtagcaaaag

SEQ ID NO: 80 - DNA, 20 bp, synthetic construct
  source 1..20: mol_type = other DNA
tggcaagtcatgtagcaaaa

SEQ ID NO: 81 - DNA, 20 bp, synthetic construct
  source 1..20: mol_type = other DNA
ctggcaagtcatgtagcaaa

SEQ ID NO: 82 - DNA, 20 bp, synthetic construct
  source 1..20: mol_type = other DNA
gctggcaagtcatgtagcaa

SEQ ID NO: 83 - DNA, 20 bp, synthetic construct
  source 1..20: mol_type = other DNA
cgctggcaagtcatgtagca

SEQ ID NO: 84 - DNA, 20 bp, synthetic construct
  source 1..20: mol_type = other DNA
gcgctggcaagtcatgtagc

SEQ ID NO: 85 - DNA, 20 bp, synthetic construct
  source 1..20: mol_type = other DNA
tcacttacagtctggtccca

SEQ ID NO: 86 - DNA, 20 bp, synthetic construct
  source 1..20: mol_type = other DNA
ttcacttacagtctggtccc

SEQ ID NO: 87 - DNA, 20 bp, synthetic construct
  source 1..20: mol_type = other DNA
acgttcacttacagtctggt

SEQ ID NO: 88 - DNA, 20 bp, synthetic construct
  source 1..20: mol_type = other DNA
gtgtaaaacgttcacttaca

SEQ ID NO: 89 - DNA, 20 bp, synthetic construct
  source 1..20: mol_type = other DNA
tgtgtaaaacgttcacttac

SEQ ID NO: 90 - DNA, 20 bp, synthetic construct
  source 1..20: mol_type = other DNA
gtgtgtaaaacgttcactta

SEQ ID NO: 91 - DNA, 20 bp, synthetic construct
  source 1..20: mol_type = other DNA
tgtgtgtaaaacgttcactt

SEQ ID NO: 92 - DNA, 20 bp, synthetic construct
  source 1..20: mol_type = other DNA
tgcaaatgtgtgtaaaacgt

SEQ ID NO: 93 - DNA, 20 bp, synthetic construct
  source 1..20: mol_type = other DNA
atgcaaatgtgtgtaaaacg

SEQ ID NO: 94 - DNA, 20 bp, synthetic construct
  source 1..20: mol_type = other DNA
aatgcaaatgtgtgtaaaac

SEQ ID NO: 95 - DNA, 20 bp, synthetic construct
  source 1..20: mol_type = other DNA
caatgcaaatgtgtgtaaaa

SEQ ID NO: 96 - DNA, 20 bp, synthetic construct
  source 1..20: mol_type = other DNA
tttacaatgcaaatgtgtgt

SEQ ID NO: 97 - DNA, 20 bp, synthetic construct
  source 1..20: mol_type = other DNA
aaatacctggacttattttt

SEQ ID NO: 98 - DNA, 20 bp, synthetic construct
  source 1..20: mol_type = other DNA
aaaatacctggacttatttt

SEQ ID NO: 99 - DNA, 20 bp, synthetic construct
  source 1..20: mol_type = other DNA
aaaaatacctggacttattt

SEQ ID NO: 100 - DNA, 20 bp, synthetic construct
  source 1..20: mol_type = other DNA
aacgtacagaaatgggaggg

SEQ ID NO: 101 - DNA, 20 bp, synthetic construct
  source 1..20: mol_type = other DNA
aaacgtacagaaatgggagg

SEQ ID NO: 102 - DNA, 20 bp, synthetic construct
  source 1..20: mol_type = other DNA
caaacgtacagaaatgggag

SEQ ID NO: 103 - DNA, 20 bp, synthetic construct
  source 1..20: mol_type = other DNA
acaaacgtacagaaatggga

SEQ ID NO: 104 - DNA, 20 bp, synthetic construct
  source 1..20: mol_type = other DNA
aacaaacgtacagaaatggg

SEQ ID NO: 105 - DNA, 20 bp, synthetic construct
  source 1..20: mol_type = other DNA
gaacaaacgtacagaaatgg

SEQ ID NO: 106 - DNA, 20 bp, synthetic construct
  source 1..20: mol_type = other DNA
cactccacaccttgttagaa

SEQ ID NO: 107 - DNA, 20 bp, synthetic construct
  source 1..20: mol_type = other DNA
acactccacaccttgttaga

SEQ ID NO: 108 - DNA, 20 bp, synthetic construct
  source 1..20: mol_type = other DNA
gacactccacaccttgttag

SEQ ID NO: 109 - DNA, 20 bp, synthetic construct
  source 1..20: mol_type = other DNA
tcgctgacactccacacctt

SEQ ID NO: 110 - DNA, 20 bp, synthetic construct
  source 1..20: mol_type = other DNA
gtattctccccacattgcac

SEQ ID NO: 111 - DNA, 20 bp, synthetic construct
  source 1..20: mol_type = other DNA
tgtattctccccacattgca

SEQ ID NO: 112 - DNA, 20 bp, synthetic construct
  source 1..20: mol_type = other DNA
atgtattctccccacattgc

SEQ ID NO: 113 - DNA, 20 bp, synthetic construct
  source 1..20: mol_type = other DNA
acaatgtattctccccacat

SEQ ID NO: 114 - DNA, 20 bp, synthetic construct
  source 1..20: mol_type = other DNA
ttgacttccaaaccttatat

SEQ ID NO: 115 - DNA, 20 bp, synthetic construct
  source 1..20: mol_type = other DNA
tttgacttccaaaccttata

SEQ ID NO: 116 - DNA, 20 bp, synthetic construct
  source 1..20: mol_type = other DNA
ctactataatttgacttcca

SEQ ID NO: 117 - DNA, 20 bp, synthetic construct
  source 1..20: mol_type = other DNA
tctactataatttgacttcc

SEQ ID NO: 118 - DNA, 20 bp, synthetic construct
  source 1..20: mol_type = other DNA
ttctactataatttgacttc

SEQ ID NO: 119 - DNA, 20 bp, synthetic construct
  source 1..20: mol_type = other DNA
cattctactataatttgact

SEQ ID NO: 120 - DNA, 20 bp, synthetic construct
  source 1..20: mol_type = other DNA
acattctactataatttgac

SEQ ID NO: 121 - DNA, 20 bp, synthetic construct
  source 1..20: mol_type = other DNA
gatacacattctactataat

SEQ ID NO: 122 - DNA, 20 bp, synthetic construct
  source 1..20: mol_type = other DNA
agatacacattctactataa

SEQ ID NO: 123 - DNA, 20 bp, synthetic construct
  source 1..20: mol_type = other DNA
tagatacacattctactata

SEQ ID NO: 124 - DNA, 20 bp, synthetic construct
  source 1..20: mol_type = other DNA
ttagatacacattctactat

SEQ ID NO: 125 - DNA, 20 bp, synthetic construct
  source 1..20: mol_type = other DNA
tttagatacacattctacta

SEQ ID NO: 126 - DNA, 20 bp, synthetic construct
  source 1..20: mol_type = other DNA
atttagatacacattctact

SEQ ID NO: 127 - DNA, 20 bp, synthetic construct
  source 1..20: mol_type = other DNA
tatttagatacacattctac

SEQ ID NO: 128 - DNA, 20 bp, synthetic construct
  source 1..20: mol_type = other DNA
ctatttagatacacattcta

SEQ ID NO: 129 - DNA, 20 bp, synthetic construct
  source 1..20: mol_type = other DNA
cactatttagatacacattc

SEQ ID NO: 130 - DNA, 20 bp, synthetic construct
  source 1..20: mol_type = other DNA
gtcactatttagatacacat

SEQ ID NO: 131 - DNA, 20 bp, synthetic construct
  source 1..20: mol_type = other DNA
agtcactatttagatacaca

SEQ ID NO: 132 - DNA, 20 bp, synthetic construct
  source 1..20: mol_type = other DNA
cagtcactatttagatacac

SEQ ID NO: 133 - DNA, 20 bp, synthetic construct
  source 1..20: mol_type = other DNA
agcagtcactatttagatac

SEQ ID NO: 134 - DNA, 20 bp, synthetic construct
  source 1..20: mol_type = other DNA
aagcagtcactatttagata

SEQ ID NO: 135 - DNA, 20 bp, synthetic construct
  source 1..20: mol_type = other DNA
aaagcagtcactatttagat

SEQ ID NO: 136 - DNA, 20 bp, synthetic construct
  source 1..20: mol_type = other DNA
caaagcagtcactatttaga

SEQ ID NO: 137 - DNA, 20 bp, synthetic construct
  source 1..20: mol_type = other DNA
gcaaagcagtcactatttag

SEQ ID NO: 138 - DNA, 20 bp, synthetic construct
  source 1..20: mol_type = other DNA
ggcaaagcagtcactattta

SEQ ID NO: 139 - DNA, 20 bp, synthetic construct
  source 1..20: mol_type = other DNA
tggcaaagcagtcactattt

SEQ ID NO: 140 - DNA, 20 bp, synthetic construct
  source 1..20: mol_type = other DNA
aatggcaaagcagtcactat

SEQ ID NO: 141 - DNA, 20 bp, synthetic construct
  source 1..20: mol_type = other DNA
aaatggcaaagcagtcacta

SEQ ID NO: 142 - DNA, 20 bp, synthetic construct
  source 1..20: mol_type = other DNA
gaaatggcaaagcagtcact

SEQ ID NO: 143 - DNA, 20 bp, synthetic construct
  source 1..20: mol_type = other DNA
aatgaaatggcaaagcagtc

SEQ ID NO: 144 - DNA, 20 bp, synthetic construct
  source 1..20: mol_type = other DNA
aggtttgaatgaaatggcaa

SEQ ID NO: 145 - DNA, 20 bp, synthetic construct
  source 1..20: mol_type = other DNA
caggtttgaatgaaatggca

SEQ ID NO: 146 - DNA, 20 bp, synthetic construct
  source 1..20: mol_type = other DNA
tcaggtttgaatgaaatggc

SEQ ID NO: 147 - DNA, 20 bp, synthetic construct
  source 1..20: mol_type = other DNA
gtcaggtttgaatgaaatgg

SEQ ID NO: 148 - DNA, 20 bp, synthetic construct
  source 1..20: mol_type = other DNA
cttgtcaggtttgaatgaaa

SEQ ID NO: 149 - DNA, 20 bp, synthetic construct
  source 1..20: mol_type = other DNA
cttagagatagacttgtcag

SEQ ID NO: 150 - DNA, 20 bp, synthetic construct
  source 1..20: mol_type = other DNA
tcttagagatagacttgtca

SEQ ID NO: 151 - DNA, 20 bp, synthetic construct
  source 1..20: mol_type = other DNA
ctcttagagatagacttgtc

SEQ ID NO: 152 - DNA, 20 bp, synthetic construct
  source 1..20: mol_type = other DNA
gctcttagagatagacttgt

SEQ ID NO: 153 - DNA, 20 bp, synthetic construct
  source 1..20: mol_type = other DNA
ggctcttagagatagacttg

SEQ ID NO: 154 - DNA, 20 bp, synthetic construct
  source 1..20: mol_type = other DNA
cggctcttagagatagactt

SEQ ID NO: 155 - DNA, 20 bp, synthetic construct
  source 1..20: mol_type = other DNA
gcggctcttagagatagact

SEQ ID NO: 156 - DNA, 20 bp, synthetic construct
  source 1..20: mol_type = other DNA
tggcggctcttagagataga

SEQ ID NO: 157 - DNA, 20 bp, synthetic construct
  source 1..20: mol_type = other DNA
tctggcggctcttagagata

SEQ ID NO: 158 - DNA, 20 bp, synthetic construct
  source 1..20: mol_type = other DNA
atctggcggctcttagagat

SEQ ID NO: 159 - DNA, 20 bp, synthetic construct
  source 1..20: mol_type = other DNA
aatctggcggctcttagaga

SEQ ID NO: 160 - DNA, 20 bp, synthetic construct
  source 1..20: mol_type = other DNA
tactgcacacatggaaatct

SEQ ID NO: 161 - DNA, 20 bp, synthetic construct
  source 1..20: mol_type = other DNA
atactgcacacatggaaatc

SEQ ID NO: 162 - DNA, 20 bp, synthetic construct
  source 1..20: mol_type = other DNA
aatactgcacacatggaaat

SEQ ID NO: 163 - DNA, 20 bp, synthetic construct
  source 1..20: mol_type = other DNA
ataatactgcacacatggaa

SEQ ID NO: 164 - DNA, 20 bp, synthetic construct
  source 1..20: mol_type = other DNA
cttataatactgcacacatg

SEQ ID NO: 165 - DNA, 20 bp, synthetic construct
  source 1..20: mol_type = other DNA
aacttataatactgcacaca

SEQ ID NO: 166 - DNA, 20 bp, synthetic construct
  source 1..20: mol_type = other DNA
taacttataatactgcacac

SEQ ID NO: 167 - DNA, 20 bp, synthetic construct
  source 1..20: mol_type = other DNA
ataacttataatactgcaca

SEQ ID NO: 168 - DNA, 20 bp, synthetic construct
  source 1..20: mol_type = other DNA
gataacttataatactgcac

SEQ ID NO: 169 - DNA, 20 bp, synthetic construct
  source 1..20: mol_type = other DNA
tgataacttataatactgca

SEQ ID NO: 170 - DNA, 20 bp, synthetic construct
  source 1..20: mol_type = other DNA
atgataacttataatactgc

SEQ ID NO: 171 - DNA, 20 bp, synthetic construct
  source 1..20: mol_type = other DNA
gttccatgataacttataat

SEQ ID NO: 172 - DNA, 20 bp, synthetic construct
  source 1..20: mol_type = other DNA
agttccatgataacttataa

SEQ ID NO: 173 - DNA, 20 bp, synthetic construct
  source 1..20: mol_type = other DNA
tagttccatgataacttata

SEQ ID NO: 174 - DNA, 20 bp, synthetic construct
  source 1..20: mol_type = other DNA
atagttccatgataacttat

SEQ ID NO: 175 - DNA, 20 bp, synthetic construct
  source 1..20: mol_type = other DNA
tatagttccatgataactta

SEQ ID NO: 176 - DNA, 20 bp, synthetic construct
  source 1..20: mol_type = other DNA
tctgcgtccaccatatagtt

SEQ ID NO: 177 - DNA, 20 bp, synthetic construct
  source 1..20: mol_type = other DNA
gtctgcgtccaccatatagt

SEQ ID NO: 178 - DNA, 20 bp, synthetic construct
  source 1..20: mol_type = other DNA
ggtctgcgtccaccatatag

SEQ ID NO: 179 - DNA, 20 bp, synthetic construct
  source 1..20: mol_type = other DNA
aggtctgcgtccaccatata

SEQ ID NO: 180 - DNA, 20 bp, synthetic construct
  source 1..20: mol_type = other DNA
aaggtctgcgtccaccatat

SEQ ID NO: 181 - DNA, 20 bp, synthetic construct
  source 1..20: mol_type = other DNA
ttctcaaggtctgcgtccac

SEQ ID NO: 182 - DNA, 20 bp, synthetic construct
  source 1..20: mol_type = other DNA
gttctcaaggtctgcgtcca

SEQ ID NO: 183 - DNA, 20 bp, synthetic construct
  source 1..20: mol_type = other DNA
tgttctcaaggtctgcgtcc

SEQ ID NO: 184 - DNA, 20 bp, synthetic construct
  source 1..20: mol_type = other DNA
ttgttctcaaggtctgcgtc

SEQ ID NO: 185 - DNA, 20 bp, synthetic construct
  source 1..20: mol_type = other DNA
gttgttctcaaggtctgcgt

SEQ ID NO: 186 - DNA, 20 bp, synthetic construct
  source 1..20: mol_type = other DNA
ggttgttctcaaggtctgcg

SEQ ID NO: 187 - DNA, 20 bp, synthetic construct
  source 1..20: mol_type = other DNA
aggttgttctcaaggtctgc

SEQ ID NO: 188 - DNA, 20 bp, synthetic construct
  source 1..20: mol_type = other DNA
taggttgttctcaaggtctg

SEQ ID NO: 189 - DNA, 20 bp, synthetic construct
  source 1..20: mol_type = other DNA
ttaggttgttctcaaggtct

SEQ ID NO: 190 - DNA, 20 bp, synthetic construct
  source 1..20: mol_type = other DNA
tttaggttgttctcaaggtc

SEQ ID NO: 191 - DNA, 20 bp, synthetic construct
  source 1..20: mol_type = other DNA
aatttaggttgttctcaagg

SEQ ID NO: 192 - DNA, 20 bp, synthetic construct
  source 1..20: mol_type = other DNA
cccataatttaggttgttct

SEQ ID NO: 193 - DNA, 20 bp, synthetic construct
  source 1..20: mol_type = other DNA
ccccataatttaggttgttc

SEQ ID NO: 194 - DNA, 20 bp, synthetic construct
  source 1..20: mol_type = other DNA
tccccataatttaggttgtt

SEQ ID NO: 195 - DNA, 20 bp, synthetic construct
  source 1..20: mol_type = other DNA
ctccccataatttaggttgt

SEQ ID NO: 196 - DNA, 20 bp, synthetic construct
  source 1..20: mol_type = other DNA
tctccccataatttaggttg

SEQ ID NO: 197 - DNA, 20 bp, synthetic construct
  source 1..20: mol_type = other DNA
aaattctccccataatttag

SEQ ID NO: 198 - DNA, 20 bp, synthetic construct
  source 1..20: mol_type = other DNA
caataaatggccaaaataat

SEQ ID NO: 199 - DNA, 20 bp, synthetic construct
  source 1..20: mol_type = other DNA
tctttggtctaaaagtaaac

SEQ ID NO: 200 - DNA, 20 bp, synthetic construct
  source 1..20: mol_type = other DNA
atctttggtctaaaagtaaa

SEQ ID NO: 201 - DNA, 20 bp, synthetic construct
  source 1..20: mol_type = other DNA
aatctttggtctaaaagtaa

SEQ ID NO: 202 - DNA, 20 bp, synthetic construct
  source 1..20: mol_type = other DNA
caatctttggtctaaaagta

SEQ ID NO: 203 - DNA, 20 bp, synthetic construct
  source 1..20: mol_type = other DNA
tttctagaacccaatctttg

SEQ ID NO: 204 - DNA, 20 bp, synthetic construct
  source 1..20: mol_type = other DNA
cattttctagaacccaatct

SEQ ID NO: 205 - DNA, 20 bp, synthetic construct
  source 1..20: mol_type = other DNA
gcattttctagaacccaatc

SEQ ID NO: 206 - DNA, 20 bp, synthetic construct
  source 1..20: mol_type = other DNA
tgcattttctagaacccaat

SEQ ID NO: 207 - DNA, 20 bp, synthetic construct
  source 1..20: mol_type = other DNA
gtgcattttctagaacccaa

SEQ ID NO: 208 - DNA, 20 bp, synthetic construct
  source 1..20: mol_type = other DNA
agtgcattttctagaaccca

SEQ ID NO: 209 - DNA, 20 bp, synthetic construct
  source 1..20: mol_type = other DNA
caagtgcattttctagaacc

SEQ ID NO: 210 - DNA, 20 bp, synthetic construct
  source 1..20: mol_type = other DNA
ccaagtgcattttctagaac

SEQ ID NO: 211 - DNA, 20 bp, synthetic construct
  source 1..20: mol_type = other DNA
accaagtgcattttctagaa

SEQ ID NO: 212 - DNA, 20 bp, synthetic construct
  source 1..20: mol_type = other DNA
taccaagtgcattttctaga

SEQ ID NO: 213 - DNA, 20 bp, synthetic construct
  source 1..20: mol_type = other DNA
ataccaagtgcattttctag

SEQ ID NO: 214 - DNA, 20 bp, synthetic construct
  source 1..20: mol_type = other DNA
tataccaagtgcattttcta

SEQ ID NO: 215 - DNA, 20 bp, synthetic construct
  source 1..20: mol_type = other DNA
gtataccaagtgcattttct

SEQ ID NO: 216 - DNA, 20 bp, synthetic construct
  source 1..20: mol_type = other DNA
agtataccaagtgcattttc

SEQ ID NO: 217 - DNA, 20 bp, synthetic construct
  source 1..20: mol_type = other DNA
tagtataccaagtgcatttt

SEQ ID NO: 218 - DNA, 20 bp, synthetic construct
  source 1..20: mol_type = other DNA
ttagtataccaagtgcattt

SEQ ID NO: 219 - DNA, 20 bp, synthetic construct
  source 1..20: mol_type = other DNA
acttagtataccaagtgcat

SEQ ID NO: 220 - DNA, 20 bp, synthetic construct
  source 1..20: mol_type = other DNA
tacttagtataccaagtgca

SEQ ID NO: 221 - DNA, 20 bp, synthetic construct
  source 1..20: mol_type = other DNA
atacttagtataccaagtgc

SEQ ID NO: 222 - DNA, 20 bp, synthetic construct
  source 1..20: mol_type = other DNA
aatacttagtataccaagtg

SEQ ID NO: 223 - DNA, 20 bp, synthetic construct
  source 1..20: mol_type = other DNA
gttttaatacttagtatacc

SEQ ID NO: 224 - DNA, 20 bp, synthetic construct
  source 1..20: mol_type = other DNA
agtgttgccaactgaaacaa

SEQ ID NO: 225 - DNA, 20 bp, synthetic construct
  source 1..20: mol_type = other DNA
caattgaatgggcagtgttg

SEQ ID NO: 226 - DNA, 20 bp, synthetic construct
  source 1..20: mol_type = other DNA
tcaattgaatgggcagtgtt

SEQ ID NO: 227 - DNA, 20 bp, synthetic construct
  source 1..20: mol_type = other DNA
ttcaattgaatgggcagtgt

SEQ ID NO: 228 - DNA, 20 bp, synthetic construct
  source 1..20: mol_type = other DNA
tgaaggcaatcgttaatttt

SEQ ID NO: 229 - DNA, 20 bp, synthetic construct
  source 1..20: mol_type = other DNA
ctgaaggcaatcgttaattt

SEQ ID NO: 230 - DNA, 20 bp, synthetic construct
  source 1..20: mol_type = other DNA
actgaaggcaatcgttaatt

SEQ ID NO: 231 - DNA, 20 bp, synthetic construct
  source 1..20: mol_type = other DNA
aactgaaggcaatcgttaat

SEQ ID NO: 232 - DNA, 20 bp, synthetic construct
  source 1..20: mol_type = other DNA
aaactgaaggcaatcgttaa

SEQ ID NO: 233 - DNA, 20 bp, synthetic construct
  source 1..20: mol_type = other DNA
caaactgaaggcaatcgtta

SEQ ID NO: 234 - DNA, 20 bp, synthetic construct
  source 1..20: mol_type = other DNA
acaaactgaaggcaatcgtt

SEQ ID NO: 235 - DNA, 20 bp, synthetic construct
  source 1..20: mol_type = other DNA
acacaaactgaaggcaatcg

SEQ ID NO: 236 - DNA, 20 bp, synthetic construct
  source 1..20: mol_type = other DNA
gtgaccacatacatcaaaat

SEQ ID NO: 237 - DNA, 20 bp, synthetic construct
  source 1..20: mol_type = other DNA
ttagtgaccacatacatcaa

SEQ ID NO: 238 - DNA, 20 bp, synthetic construct
  source 1..20: mol_type = other DNA
tttacctataagtacaatag

SEQ ID NO: 239 - DNA, 20 bp, synthetic construct
  source 1..20: mol_type = other DNA
gtttacctataagtacaata

SEQ ID NO: 240 - DNA, 20 bp, synthetic construct
  source 1..20: mol_type = other DNA
ggtttacctataagtacaat

SEQ ID NO: 241 - DNA, 20 bp, synthetic construct
  source 1..20: mol_type = other DNA
acatatttgcaaggtttacc

SEQ ID NO: 242 - DNA, 20 bp, synthetic construct
  source 1..20: mol_type = other DNA
tacatatttgcaaggtttac

SEQ ID NO: 243 - DNA, 20 bp, synthetic construct
  source 1..20: mol_type = other DNA
ttacatatttgcaaggttta

SEQ ID NO: 244 - DNA, 20 bp, synthetic construct
  source 1..20: mol_type = other DNA
gttacatatttgcaaggttt

SEQ ID NO: 245 - DNA, 20 bp, synthetic construct
  source 1..20: mol_type = other DNA
ggttacatatttgcaaggtt

SEQ ID NO: 246 - DNA, 20 bp, synthetic construct
  source 1..20: mol_type = other DNA
aggttacatatttgcaaggt

SEQ ID NO: 247 - DNA, 20 bp, synthetic construct
  source 1..20: mol_type = other DNA
caggttacatatttgcaagg

SEQ ID NO: 248 - DNA, 20 bp, synthetic construct
  source 1..20: mol_type = other DNA
acaggttacatatttgcaag

SEQ ID NO: 249 - DNA, 20 bp, synthetic construct
  source 1..20: mol_type = other DNA
acacaggttacatatttgca

SEQ ID NO: 250 - DNA, 20 bp, synthetic construct
  source 1..20: mol_type = other DNA
aacacaggttacatatttgc

SEQ ID NO: 251 - DNA, 20 bp, synthetic construct
  source 1..20: mol_type = other DNA
gcaacacaggttacatattt

SEQ ID NO: 252 - DNA, 20 bp, synthetic construct
  source 1..20: mol_type = other DNA
gcgcaacacaggttacatat

SEQ ID NO: 253 - DNA, 20 bp, synthetic construct
  source 1..20: mol_type = other DNA
tgcgcaacacaggttacata

SEQ ID NO: 254 - DNA, 20 bp, synthetic construct
  source 1..20: mol_type = other DNA
ttgcgcaacacaggttacat

SEQ ID NO: 255 - DNA, 20 bp, synthetic construct
  source 1..20: mol_type = other DNA
tttgcgcaacacaggttaca

SEQ ID NO: 256 - DNA, 20 bp, synthetic construct
  source 1..20: mol_type = other DNA
catttgcgcaacacaggtta

SEQ ID NO: 257 - DNA, 20 bp, synthetic construct
  source 1..20: mol_type = other DNA
actcaaatttatgcggcatt

SEQ ID NO: 258 - DNA, 20 bp, synthetic construct
  source 1..20: mol_type = other DNA
atcactcaaatttatgcggc

SEQ ID NO: 259 - DNA, 20 bp, synthetic construct
  source 1..20: mol_type = other DNA
acattaacaatcactcaaat

SEQ ID NO: 260 - DNA, 20 bp, synthetic construct
  source 1..20: mol_type = other DNA
caacattaacaatcactcaa

SEQ ID NO: 261 - DNA, 20 bp, synthetic construct
  source 1..20: mol_type = other DNA
acaacattaacaatcactca

SEQ ID NO: 262 - DNA, 20 bp, synthetic construct
  source 1..20: mol_type = other DNA
gacaacattaacaatcactc

SEQ ID NO: 263 - DNA, 20 bp, synthetic construct
  source 1..20: mol_type = other DNA
agacaacattaacaatcact

SEQ ID NO: 264 - DNA, 20 bp, synthetic construct
  source 1..20: mol_type = other DNA
accacagtatcacaatcaag

SEQ ID NO: 265 - DNA, 20 bp, synthetic construct
  source 1..20: mol_type = other DNA
gaccacagtatcacaatcaa

SEQ ID NO: 266 - DNA, 20 bp, synthetic construct
  source 1..20: mol_type = other DNA
tgaccacagtatcacaatca

SEQ ID NO: 267 - DNA, 20 bp, synthetic construct
  source 1..20: mol_type = other DNA
atgaccacagtatcacaatc

SEQ ID NO: 268 - DNA, 20 bp, synthetic construct
  source 1..20: mol_type = other DNA
catatgaccacagtatcaca

SEQ ID NO: 269 - DNA, 20 bp, synthetic construct
  source 1..20: mol_type = other DNA
gcatatgaccacagtatcac

SEQ ID NO: 270 - DNA, 20 bp, synthetic construct
  source 1..20: mol_type = other DNA
gacaaacacgggcatatgac

SEQ ID NO: 271 - DNA, 20 bp, synthetic construct
  source 1..20: mol_type = other DNA
tgacaaacacgggcatatga

SEQ ID NO: 272 - DNA, 20 bp, synthetic construct
  source 1..20: mol_type = other DNA
gttcatagtaaacatttttg

SEQ ID NO: 273 - DNA, 20 bp, synthetic construct
  source 1..20: mol_type = other DNA
gtgttcatagtaaacatttt

SEQ ID NO: 274 - DNA, 20 bp, synthetic construct
  source 1..20: mol_type = other DNA
tgtgttcatagtaaacattt

SEQ ID NO: 275 - DNA, 20 bp, synthetic construct
  source 1..20: mol_type = other DNA
tctgtgtgttcatagtaaac

SEQ ID NO: 276 - DNA, 20 bp, synthetic construct
  source 1..20: mol_type = other DNA
ttctgtgtgttcatagtaaa

SEQ ID NO: 277 - DNA, 20 bp, synthetic construct
  source 1..20: mol_type = other DNA
tatttctgtgtgttcatagt

SEQ ID NO: 278 - DNA, 20 bp, synthetic construct
  source 1..20: mol_type = other DNA
gatatatatgaatttagcct

SEQ ID NO: 279 - DNA, 20 bp, synthetic construct
  source 1..20: mol_type = other DNA
agatatatatgaatttagcc

SEQ ID NO: 280 - DNA, 20 bp, synthetic construct
  source 1..20: mol_type = other DNA
agacaaaagtatcaagatat

SEQ ID NO: 281 - DNA, 20 bp, synthetic construct
  source 1..20: mol_type = other DNA
agttgattggtctttaaaaa

SEQ ID NO: 282 - DNA, 20 bp, synthetic construct
  source 1..20: mol_type = other DNA
ccctataagttgattggtct

SEQ ID NO: 283 - DNA, 20 bp, synthetic construct
  source 1..20: mol_type = other DNA
aaaaagcctttgaattccct

SEQ ID NO: 284 - DNA, 20 bp, synthetic construct
  source 1..20: mol_type = other DNA
taaattttagtttggctgaa

SEQ ID NO: 285 - DNA, 20 bp, synthetic construct
  source 1..20: mol_type = other DNA
ttaaattttagtttggctga

SEQ ID NO: 286 - DNA, 20 bp, synthetic construct
  source 1..20: mol_type = other DNA
tttaaattttagtttggctg

SEQ ID NO: 287 - DNA, 20 bp, synthetic construct
  source 1..20: mol_type = other DNA
gtttaaattttagtttggct

SEQ ID NO: 288 - DNA, 20 bp, synthetic construct
  source 1..20: mol_type = other DNA
ttagagtcagttcaaattaa

SEQ ID NO: 289 - DNA, 20 bp, synthetic construct
  source 1..20: mol_type = other DNA
tttagagtcagttcaaatta

SEQ ID NO: 290 - DNA, 20 bp, synthetic construct
  source 1..20: mol_type = other DNA
ttttagagtcagttcaaatt

SEQ ID NO: 291 - DNA, 20 bp, synthetic construct
  source 1..20: mol_type = other DNA
tcatttttagagtcagttca

SEQ ID NO: 292 - DNA, 20 bp, synthetic construct
  source 1..20: mol_type = other DNA
ttcatttttagagtcagttc

SEQ ID NO: 293 - DNA, 20 bp, synthetic construct
  source 1..20: mol_type = other DNA
gttcacaaagggaaaaatac

SEQ ID NO: 294 - DNA, 20 bp, synthetic construct
  source 1..20: mol_type = other DNA
ctgctccttgtaaaatttgt

SEQ ID NO: 295 - DNA, 20 bp, synthetic construct
  source 1..20: mol_type = other DNA
gctgctccttgtaaaatttg

SEQ ID NO: 296 - DNA, 20 bp, synthetic construct
  source 1..20: mol_type = other DNA
tgtttattaaataggctgct

SEQ ID NO: 297 - DNA, 20 bp, synthetic construct
  source 1..20: mol_type = other DNA
gtgtttattaaataggctgc

SEQ ID NO: 298 - DNA, 20 bp, synthetic construct
  source 1..20: mol_type = other DNA
tagtgtttattaaataggct

SEQ ID NO: 299 - DNA, 20 bp, synthetic construct
  source 1..20: mol_type = other DNA
ctagtgtttattaaataggc

SEQ ID NO: 300 - DNA, 20 bp, synthetic construct
  source 1..20: mol_type = other DNA
gctagtgtttattaaatagg

SEQ ID NO: 301 - DNA, 20 bp, synthetic construct
  source 1..20: mol_type = other DNA
aaagcctatactttgtttaa

SEQ ID NO: 302 - DNA, 20 bp, synthetic construct
  source 1..20: mol_type = other DNA
tcagctgaaaagcctatact

SEQ ID NO: 303 - DNA, 20 bp, synthetic construct
  source 1..20: mol_type = other DNA
atcagctgaaaagcctatac

SEQ ID NO: 304 - DNA, 20 bp, synthetic construct
  source 1..20: mol_type = other DNA
tatcagctgaaaagcctata

SEQ ID NO: 305 - DNA, 20 bp, synthetic construct
  source 1..20: mol_type = other DNA
gtatcagctgaaaagcctat

SEQ ID NO: 306 - DNA, 20 bp, synthetic construct
  source 1..20: mol_type = other DNA
ggtatcagctgaaaagccta

SEQ ID NO: 307 - DNA, 20 bp, synthetic construct
  source 1..20: mol_type = other DNA
tgtatatccacagaaactta

SEQ ID NO: 308 - DNA, 20 bp, synthetic construct
  source 1..20: mol_type = other DNA
ctttttgctgtatatccaca

SEQ ID NO: 309 - DNA, 20 bp, synthetic construct
  source 1..20: mol_type = other DNA
tctttttgctgtatatccac

SEQ ID NO: 310 - DNA, 20 bp, synthetic construct
  source 1..20: mol_type = other DNA
ctctttttgctgtatatcca

SEQ ID NO: 311 - DNA, 20 bp, synthetic construct
  source 1..20: mol_type = other DNA
tctctttttgctgtatatcc

SEQ ID NO: 312 - DNA, 20 bp, synthetic construct
  source 1..20: mol_type = other DNA
atctctttttgctgtatatc

SEQ ID NO: 313 - DNA, 20 bp, synthetic construct
  source 1..20: mol_type = other DNA
atatctctttttgctgtata

SEQ ID NO: 314 - DNA, 20 bp, synthetic construct
  source 1..20: mol_type = other DNA
tatatctctttttgctgtat

SEQ ID NO: 315 - DNA, 20 bp, synthetic construct
  source 1..20: mol_type = other DNA
ttatatctctttttgctgta

SEQ ID NO: 316 - DNA, 20 bp, synthetic construct
  source 1..20: mol_type = other DNA
attatatctctttttgctgt

SEQ ID NO: 317 - DNA, 20 bp, synthetic construct
  source 1..20: mol_type = other DNA
aattatatctctttttgctg

SEQ ID NO: 318 - DNA, 20 bp, synthetic construct
  source 1..20: mol_type = other DNA
ggtaaagagctatgcacaga

SEQ ID NO: 319 - DNA, 20 bp, synthetic construct
  source 1..20: mol_type = other DNA
gggtaaagagctatgcacag

SEQ ID NO: 320 - DNA, 20 bp, synthetic construct
  source 1..20: mol_type = other DNA
agggtaaagagctatgcaca

SEQ ID NO: 321 - DNA, 20 bp, synthetic construct
  source 1..20: mol_type = other DNA
cagggtaaagagctatgcac

SEQ ID NO: 322 - DNA, 20 bp, synthetic construct
  source 1..20: mol_type = other DNA
acagggtaaagagctatgca

SEQ ID NO: 323 - DNA, 20 bp, synthetic construct
  source 1..20: mol_type = other DNA
aacacagggtaaagagctat

SEQ ID NO: 324 - DNA, 20 bp, synthetic construct
  source 1..20: mol_type = other DNA
gccaagctctattaacaata

SEQ ID NO: 325 - DNA, 20 bp, synthetic construct
  source 1..20: mol_type = other DNA
tgccaagctctattaacaat

SEQ ID NO: 326 - DNA, 20 bp, synthetic construct
  source 1..20: mol_type = other DNA
ttgccaagctctattaacaa

SEQ ID NO: 327 - DNA, 20 bp, synthetic construct
  source 1..20: mol_type = other DNA
tttgccaagctctattaaca

SEQ ID NO: 328 - DNA, 20 bp, synthetic construct
  source 1..20: mol_type = other DNA
ataatttgccaagctctatt

SEQ ID NO: 329 - DNA, 20 bp, synthetic construct
  source 1..20: mol_type = other DNA
tataatttgccaagctctat

SEQ ID NO: 330 - DNA, 20 bp, synthetic construct
  source 1..20: mol_type = other DNA
ttataatttgccaagctcta

SEQ ID NO: 331 - DNA, 20 bp, synthetic construct
  source 1..20: mol_type = other DNA
atttataatttgccaagctc

SEQ ID NO: 332 - DNA, 20 bp, synthetic construct
  source 1..20: mol_type = other DNA
tatttataatttgccaagct

SEQ ID NO: 333 - DNA, 20 bp, synthetic construct
  source 1..20: mol_type = other DNA
ttatttataatttgccaagc

SEQ ID NO: 334 - DNA, 20 bp, synthetic construct
  source 1..20: mol_type = other DNA
acttctatctaaccatatac

SEQ ID NO: 335 - DNA, 20 bp, synthetic construct
  source 1..20: mol_type = other DNA
gtcacttctatctaaccata

SEQ ID NO: 336 - DNA, 20 bp, synthetic construct
  source 1..20: mol_type = other DNA
agtcacttctatctaaccat

SEQ ID NO: 337 - DNA, 20 bp, synthetic construct
  source 1..20: mol_type = other DNA
tagtcacttctatctaacca

SEQ ID NO: 338 - DNA, 20 bp, synthetic construct
  source 1..20: mol_type = other DNA
atagtcacttctatctaacc

SEQ ID NO: 339 - DNA, 20 bp, synthetic construct
  source 1..20: mol_type = other DNA
tatagtcacttctatctaac

SEQ ID NO: 340 - DNA, 20 bp, synthetic construct
  source 1..20: mol_type = other DNA
ttatagtcacttctatctaa

SEQ ID NO: 341 - DNA, 20 bp, synthetic construct
  source 1..20: mol_type = other DNA
attatagtcacttctatcta

SEQ ID NO: 342 - DNA, 20 bp, synthetic construct
  source 1..20: mol_type = other DNA
cattatagtcacttctatct

SEQ ID NO: 343 - DNA, 20 bp, synthetic construct
  source 1..20: mol_type = other DNA
gcattatagtcacttctatc

SEQ ID NO: 344 - DNA, 20 bp, synthetic construct
  source 1..20: mol_type = other DNA
tgcattatagtcacttctat

SEQ ID NO: 345 - DNA, 20 bp, synthetic construct
  source 1..20: mol_type = other DNA
gtgcattatagtcacttcta

SEQ ID NO: 346 - DNA, 20 bp, synthetic construct
  source 1..20: mol_type = other DNA
gggctctgtgtgtctatata

SEQ ID NO: 347 - DNA, 20 bp, synthetic construct
  source 1..20: mol_type = other DNA
agggctctgtgtgtctatat

SEQ ID NO: 348 - DNA, 20 bp, synthetic construct
  source 1..20: mol_type = other DNA
aagggctctgtgtgtctata

SEQ ID NO: 349 - DNA, 20 bp, synthetic construct
  source 1..20: mol_type = other DNA
gaagggctctgtgtgtctat

SEQ ID NO: 350 - DNA, 20 bp, synthetic construct
  source 1..20: mol_type = other DNA
tgaagggctctgtgtgtcta

SEQ ID NO: 351 - DNA, 20 bp, synthetic construct
  source 1..20: mol_type = other DNA
actgaagggctctgtgtgtc

SEQ ID NO: 352 - DNA, 20 bp, synthetic construct
  source 1..20: mol_type = other DNA
gaactgaagggctctgtgtg

SEQ ID NO: 353 - DNA, 20 bp, synthetic construct
  source 1..20: mol_type = other DNA
tgaactgaagggctctgtgt

SEQ ID NO: 354 - DNA, 20 bp, synthetic construct
  source 1..20: mol_type = other DNA
ctgaactgaagggctctgtg

SEQ ID NO: 355 - DNA, 20 bp, synthetic construct
  source 1..20: mol_type = other DNA
cctgaactgaagggctctgt

SEQ ID NO: 356 - DNA, 20 bp, synthetic construct
  source 1..20: mol_type = other DNA
aaattgtacctgaactgaag

SEQ ID NO: 357 - DNA, 20 bp, synthetic construct
  source 1..20: mol_type = other DNA
caaattgtacctgaactgaa

SEQ ID NO: 358 - DNA, 20 bp, synthetic construct
  source 1..20: mol_type = other DNA
gcaaattgtacctgaactga

SEQ ID NO: 359 - DNA, 20 bp, synthetic construct
  source 1..20: mol_type = other DNA
cgcaaattgtacctgaactg

SEQ ID NO: 360 - DNA, 20 bp, synthetic construct
  source 1..20: mol_type = other DNA
gcgcaaattgtacctgaact

SEQ ID NO: 361 - DNA, 20 bp, synthetic construct
  source 1..20: mol_type = other DNA
ataaatgctgacttagaaag

SEQ ID NO: 362 - DNA, 20 bp, synthetic construct
  source 1..20: mol_type = other DNA
aaataaatgctgacttagaa

SEQ ID NO: 363 - DNA, 20 bp, synthetic construct
  source 1..20: mol_type = other DNA
aaaataaatgctgacttaga

SEQ ID NO: 364 - DNA, 20 bp, synthetic construct
  source 1..20: mol_type = other DNA
gtgggtaaacagccacaaaa

SEQ ID NO: 365 - DNA, 20 bp, synthetic construct
  source 1..20: mol_type = other DNA
tgtgggtaaacagccacaaa

SEQ ID NO: 366 - DNA, 20 bp, synthetic construct
  source 1..20: mol_type = other DNA
attgtgggtaaacagccaca

SEQ ID NO: 367 - DNA, 20 bp, synthetic construct
  source 1..20: mol_type = other DNA
cattgtgggtaaacagccac

SEQ ID NO: 368 - DNA, 20 bp, synthetic construct
  source 1..20: mol_type = other DNA
tcattgtgggtaaacagcca

SEQ ID NO: 369 - DNA, 20 bp, synthetic construct
  source 1..20: mol_type = other DNA
ttcattgtgggtaaacagcc

SEQ ID NO: 370 - DNA, 20 bp, synthetic construct
  source 1..20: mol_type = other DNA
tttcattgtgggtaaacagc

SEQ ID NO: 371 - DNA, 20 bp, synthetic construct
  source 1..20: mol_type = other DNA
ctttcattgtgggtaaacag

SEQ ID NO: 372 - DNA, 20 bp, synthetic construct
  source 1..20: mol_type = other DNA
tctttcattgtgggtaaaca

SEQ ID NO: 373 - DNA, 20 bp, synthetic construct
  source 1..20: mol_type = other DNA
ctctttcattgtgggtaaac

SEQ ID NO: 374 - DNA, 20 bp, synthetic construct
  source 1..20: mol_type = other DNA
actctttcattgtgggtaaa

SEQ ID NO: 375 - DNA, 20 bp, synthetic construct
  source 1..20: mol_type = other DNA
aactctttcattgtgggtaa

SEQ ID NO: 376 - DNA, 20 bp, synthetic construct
  source 1..20: mol_type = other DNA
gaactctttcattgtgggta

SEQ ID NO: 377 - DNA, 20 bp, synthetic construct
  source 1..20: mol_type = other DNA
agaactctttcattgtgggt

SEQ ID NO: 378 - DNA, 20 bp, synthetic construct
  source 1..20: mol_type = other DNA
tagaactctttcattgtggg

SEQ ID NO: 379 - DNA, 20 bp, synthetic construct
  source 1..20: mol_type = other DNA
ttagaactctttcattgtgg

SEQ ID NO: 380 - DNA, 20 bp, synthetic construct
  source 1..20: mol_type = other DNA
ctttattagaactctttcat

SEQ ID NO: 381 - DNA, 20 bp, synthetic construct
  source 1..20: mol_type = other DNA
acatctttattagaactctt

SEQ ID NO: 382 - DNA, 20 bp, synthetic construct
  source 1..20: mol_type = other DNA
gcacatctttattagaactc

SEQ ID NO: 383 - DNA, 20 bp, synthetic construct
  source 1..20: mol_type = other DNA
cagcacatctttattagaac

SEQ ID NO: 384 - DNA, 20 bp, synthetic construct
  source 1..20: mol_type = other DNA
tcagcacatctttattagaa

SEQ ID NO: 385 - DNA, 15 bp, synthetic construct
  source 1..15: mol_type = other DNA
ggccagcttggcccg

SEQ ID NO: 386 - DNA, 16 bp, synthetic construct
  source 1..16: mol_type = other DNA
gcgcaccgcgcttgaa

SEQ ID NO: 387 - DNA, 17 bp, synthetic construct
  source 1..17: mol_type = other DNA
gccggtggaggtgaggc

SEQ ID NO: 388 - DNA, 19 bp, synthetic construct
  source 1..19: mol_type = other DNA
cgcggtccatgaaggtgag

SEQ ID NO: 389 - DNA, 18 bp, synthetic construct
  source 1..18: mol_type = other DNA
gccagtagagggagccgg

SEQ ID NO: 390 - DNA, 19 bp, synthetic construct
  source 1..19: mol_type = other DNA
gacaggaagggcgacatgg

SEQ ID NO: 391 - DNA, 16 bp, synthetic construct
  source 1..16: mol_type = other DNA
gcgggggtggtgcagg

SEQ ID NO: 392 - DNA, 22 bp, synthetic construct
  source 1..22: mol_type = other DNA
tgtaactcaaagtgctgctggc

SEQ ID NO: 393 - DNA, 16 bp, synthetic construct
  source 1..16: mol_type = other DNA
gccgacgtggtgccgt

SEQ ID NO: 394 - DNA, 18 bp, synthetic construct
  source 1..18: mol_type = other DNA
atggggtggctggggtag

SEQ ID NO: 395 - DNA, 20 bp, synthetic construct
  source 1..20: mol_type = other DNA
tcaacacggagctgtagggc

SEQ ID NO: 396 - DNA, 20 bp, synthetic construct
  source 1..20: mol_type = other DNA
gttgcccagcgagttctgag

SEQ ID NO: 397 - DNA, 20 bp, synthetic construct
  source 1..20: mol_type = other DNA
gcggtggagaaggagtggtt

SEQ ID NO: 398 - DNA, 17 bp, synthetic construct
  source 1..17: mol_type = other DNA
ccacgctcaggccgttg

SEQ ID NO: 399 - DNA, 17 bp, synthetic construct
  source 1..17: mol_type = other DNA
cccgttgaccagccggt

SEQ ID NO: 400 - DNA, 18 bp, synthetic construct
  source 1..18: mol_type = other DNA
cgtggcgtacgggatctc

SEQ ID NO: 401 - DNA, 17 bp, synthetic construct
  source 1..17: mol_type = other DNA
gcggccgtgaggtggtg

SEQ ID NO: 402 - DNA, 15 bp, synthetic construct
  source 1..15: mol_type = other DNA
gaggcggctagcgcg

SEQ ID NO: 403 - DNA, 16 bp, synthetic construct
  source 1..16: mol_type = other DNA
caggccgcagggcacc

SEQ ID NO: 404 - DNA, 17 bp, synthetic construct
  source 1..17: mol_type = other DNA
ccagagcagggcaccga

SEQ ID NO: 405 - DNA, 21 bp, synthetic construct
  source 1..21: mol_type = other DNA
caggggttgagggagtaggtc

SEQ ID NO: 406 - DNA, 18 bp, synthetic construct
  source 1..18: mol_type = other DNA
gcgagcaggttgacggag

SEQ ID NO: 407 - DNA, 22 bp, synthetic construct
  source 1..22: mol_type = other DNA
gaaaaagtaactggtctggccc

SEQ ID NO: 408 - DNA, 16 bp, synthetic construct
  source 1..16: mol_type = other DNA
ggtgcgggacgtgggg

SEQ ID NO: 409 - DNA, 21 bp, synthetic construct
  source 1..21: mol_type = other DNA
tgctctgcgaagtcattgacg

SEQ ID NO: 410 - DNA, 17 bp, synthetic construct
  source 1..17: mol_type = other DNA
ggcgctcatggacgtgc

SEQ ID NO: 411 - DNA, 16 bp, synthetic construct
  source 1..16: mol_type = other DNA
aggaggacgcggccct

SEQ ID NO: 412 - DNA, 20 bp, synthetic construct
  source 1..20: mol_type = other DNA
gaatttgccatgggtggaat

SEQ ID NO: 413 - DNA, 20 bp, synthetic construct
  source 1..20: mol_type = other DNA
ggagggatctcgctcctgga

SEQ ID NO: 414 - DNA, 19 bp, synthetic construct
  source 1..19: mol_type = other DNA
ccccagccttctccatggt

SEQ ID NO: 415 - DNA, 19 bp, synthetic construct
  source 1..19: mol_type = other DNA
gctcccccctgcaaatgag

SEQ ID NO: 416 - DNA, 18 bp, synthetic construct
  source 1..18: mol_type = other DNA
agccttgacggtgccatg

SEQ ID NO: 417 - DNA, 21 bp, synthetic construct
  source 1..21: mol_type = other DNA
gatgacaagcttcccgttctc

SEQ ID NO: 418 - DNA, 22 bp, synthetic construct
  source 1..22: mol_type = other DNA
agatggtgatgggatttccatt

SEQ ID NO: 419 - DNA, 20 bp, synthetic construct
  source 1..20: mol_type = other DNA
gcatcgccccacttgatttt

SEQ ID NO: 420 - DNA, 19 bp, synthetic construct
  source 1..19: mol_type = other DNA
cacgacgtactcagcgcca

SEQ ID NO: 421 - DNA, 22 bp, synthetic construct
  source 1..22: mol_type = other DNA
ggcagagatgatgacccttttg

SEQ ID NO: 422 - DNA, 21 bp, synthetic construct
  source 1..21: mol_type = other DNA
ggtgaagacgccagtggactc

SEQ ID NO: 423 - RNA, 20 nt, synthetic construct
  source 1..20: mol_type = other RNA
  modified_base 1: mod_base = OTHER; note = 2'-O-methoxy-ethyl modified thymine with phosphorothioate linkage
  modified_base 2: mod_base = OTHER; note = 2'-O-methoxy-ethyl modified nucleotide with phosphorothioate linkage
  modified_base 3: mod_base = OTHER; note = 2'-O-methoxy-ethyl modified nucleotide with phosphorothioate linkage
  modified_base 4: mod_base = OTHER; note = 2'-O-methoxy-ethyl modified nucleotide with phosphorothioate linkage
  modified_base 5: mod_base = OTHER; note = 2'-O-methoxy-ethyl modified thymine with phosphorothioate linkage
  modified_base 6: mod_base = OTHER; note = 2'-O-methoxy-ethyl modified thymine with phosphorothioate linkage
  modified_base 7: mod_base = OTHER; note = 2'-O-methoxy-ethyl modified thymine with phosphorothioate linkage
  modified_base 8: mod_base = OTHER; note = 2'-O-methoxy-ethyl modified thymine with phosphorothioate linkage
  modified_base 9: mod_base = OTHER; note = 2'-O-methoxy-ethyl modified nucleotide with phosphorothioate linkage
  modified_base 10: mod_base = OTHER; note = 2'-O-methoxy-ethyl modified nucleotide with phosphorothioate linkage
  modified_base 11: mod_base = OTHER; note = 2'-O-methoxy-ethyl modified thymine with phosphorothioate linkage
  modified_base 12: mod_base = OTHER; note = 2'-O-methoxy-ethyl modified thymine with phosphorothioate linkage
  modified_base 13: mod_base = OTHER; note = 2'-O-methoxy-ethyl modified thymine with phosphorothioate linkage
  modified_base 14: mod_base = OTHER; note = 2'-O-methoxy-ethyl modified nucleotide with phosphorothioate linkage
  modified_base 15: mod_base = OTHER; note = 2'-O-methoxy-ethyl modified nucleotide with phosphorothioate linkage
  modified_base 16: mod_base = OTHER; note = 2'-O-methoxy-ethyl modified nucleotide with phosphorothioate linkage
  modified_base 17: mod_base = OTHER; note = 2'-O-methoxy-ethyl modified thymine with phosphorothioate linkage
  modified_base 18: mod_base = OTHER; note = 2'-O-methoxy-ethyl modified nucleotide with phosphorothioate linkage
  modified_base 19: mod_base = OTHER; note = 2'-O-methoxy-ethyl modified nucleotide with phosphorothioate linkage
  modified_base 20: mod_base = OTHER; note = 2'-O-methoxy-ethyl modified nucleotide
taaattttagtttggctgaa

SEQ ID NO: 424 - RNA, 20 nt, synthetic construct
  source 1..20: mol_type = other RNA
  modified_base 1: mod_base = OTHER; note = Locked thymine with phosphorothioate linkage
  modified_base 2: mod_base = OTHER; note = 2'-O-methoxy-ethyl modified nucleotide with phosphorothioate linkage
  modified_base 3: mod_base = OTHER; note = 2'-O-methoxy-ethyl modified nucleotide with phosphorothioate linkage
  modified_base 4: mod_base = OTHER; note = 2'-O-methoxy-ethyl modified nucleotide with phosphorothioate linkage
  modified_base 5: mod_base = OTHER; note = 2'-O-methoxy-ethyl modified thymine with phosphorothioate linkage
  modified_base 6: mod_base = OTHER; note = 2'-O-methoxy-ethyl modified thymine with phosphorothioate linkage
  modified_base 7: mod_base = OTHER; note = 2'-O-methoxy-ethyl modified thymine with phosphorothioate linkage
  modified_base 8: mod_base = OTHER; note = 2'-O-methoxy-ethyl modified thymine with phosphorothioate linkage
  modified_base 9: mod_base = OTHER; note = 2'-O-methoxy-ethyl modified nucleotide with phosphorothioate linkage
  modified_base 10: mod_base = OTHER; note = 2'-O-methoxy-ethyl modified nucleotide with phosphorothioate linkage
  modified_base 11: mod_base = OTHER; note = 2'-O-methoxy-ethyl modified thymine with phosphorothioate linkage
  modified_base 12: mod_base = OTHER; note = 2'-O-methoxy-ethyl modified thymine with phosphorothioate linkage
  modified_base 13: mod_base = OTHER; note = 2'-O-methoxy-ethyl modified thymine with phosphorothioate linkage
  modified_base 14: mod_base = OTHER; note = 2'-O-methoxy-ethyl modified nucleotide with phosphorothioate linkage
  modified_base 15: mod_base = OTHER; note = 2'-O-methoxy-ethyl modified nucleotide with phosphorothioate linkage
  modified_base 16: mod_base = OTHER; note = 2'-O-methoxy-ethyl modified nucleotide with phosphorothioate linkage
  modified_base 17: mod_base = OTHER; note = 2'-O-methoxy-ethyl modified thymine with phosphorothioate linkage
  modified_base 18: mod_base = OTHER; note = 2'-O-methoxy-ethyl modified nucleotide with phosphorothioate linkage
  modified_base 19: mod_base = OTHER; note = 2'-O-methoxy-ethyl modified nucleotide with phosphorothioate linkage
  modified_base 20: mod_base = OTHER; note = 2'-O-methoxy-ethyl modified nucleotide
taaattttagtttggctgaa

SEQ ID NO: 425 - RNA, 20 nt, synthetic construct
  source 1..20: mol_type = other RNA
  modified_base 1: mod_base = OTHER; note = 2'-O-methoxy-ethyl modified thymine with phosphorothioate linkage
  modified_base 2: mod_base = OTHER; note = Locked nucleotide with phosphorothioate linkage
  modified_base 3: mod_base = OTHER; note = 2'-O-methoxy-ethyl modified nucleotide with phosphorothioate linkage
  modified_base 4: mod_base = OTHER; note = 2'-O-methoxy-ethyl modified nucleotide with phosphorothioate linkage
  modified_base 5: mod_base = OTHER; note = 2'-O-methoxy-ethyl modified thymine with phosphorothioate linkage
  modified_base 6: mod_base = OTHER; note = 2'-O-methoxy-ethyl modified thymine with phosphorothioate linkage
  modified_base 7: mod_base = OTHER; note = 2'-O-methoxy-ethyl modified thymine with phosphorothioate linkage
  modified_base 8: mod_base = OTHER; note = 2'-O-methoxy-ethyl modified thymine with phosphorothioate linkage
  modified_base 9: mod_base = OTHER; note = 2'-O-methoxy-ethyl modified nucleotide with phosphorothioate linkage
  modified_base 10: mod_base = OTHER; note = 2'-O-methoxy-ethyl modified nucleotide with phosphorothioate linkage
  modified_base 11: mod_base = OTHER; note = 2'-O-methoxy-ethyl modified thymine with phosphorothioate linkage
  modified_base 12: mod_base = OTHER; note = 2'-O-methoxy-ethyl modified thymine with phosphorothioate linkage
  modified_base 13: mod_base = OTHER; note = 2'-O-methoxy-ethyl modified thymine with phosphorothioate linkage
  modified_base 14: mod_base = OTHER; note = 2'-O-methoxy-ethyl modified nucleotide with phosphorothioate linkage
  modified_base 15: mod_base = OTHER; note = 2'-O-methoxy-ethyl modified nucleotide with phosphorothioate linkage
  modified_base 16: mod_base = OTHER; note = 2'-O-methoxy-ethyl modified nucleotide with phosphorothioate linkage
  modified_base 17: mod_base = OTHER; note = 2'-O-methoxy-ethyl modified thymine with phosphorothioate linkage
  modified_base 18: mod_base = OTHER; note = 2'-O-methoxy-ethyl modified nucleotide with phosphorothioate linkage
  modified_base 19: mod_base = OTHER; note = 2'-O-methoxy-ethyl modified nucleotide with phosphorothioate linkage
  modified_base 20: mod_base = OTHER; note = 2'-O-methoxy-ethyl modified nucleotide
taaattttagtttggctgaa

SEQ ID NO: 426 - RNA, 20 nt, synthetic construct
  source 1..20: mol_type = other RNA
  modified_base 1: mod_base = OTHER; note = 2'-O-methoxy-ethyl modified thymine with phosphorothioate linkage
  modified_base 2: mod_base = OTHER; note = 2'-O-methoxy-ethyl modified nucleotide with phosphorothioate linkage
  modified_base 3: mod_base = OTHER; note = Locked nucleotide with phosphorothioate linkage
  modified_base 4: mod_base = OTHER; note = 2'-O-methoxy-ethyl modified nucleotide with phosphorothioate linkage
  modified_base 5: mod_base = OTHER; note = 2'-O-methoxy-ethyl modified thymine with phosphorothioate linkage
  modified_base 6: mod_base = OTHER; note = 2'-O-methoxy-ethyl modified thymine with phosphorothioate linkage
  modified_base 7: mod_base = OTHER; note = 2'-O-methoxy-ethyl modified thymine with phosphorothioate linkage
  modified_base 8: mod_base = OTHER; note = 2'-O-methoxy-ethyl modified thymine with phosphorothioate linkage
  modified_base 9: mod_base = OTHER; note = 2'-O-methoxy-ethyl modified nucleotide with phosphorothioate linkage
  modified_base 10: mod_base = OTHER; note = 2'-O-methoxy-ethyl modified nucleotide with phosphorothioate linkage
  modified_base 11: mod_base = OTHER; note = 2'-O-methoxy-ethyl modified thymine with phosphorothioate linkage
  modified_base 12: mod_base = OTHER; note = 2'-O-methoxy-ethyl modified thymine with phosphorothioate linkage
  modified_base 13: mod_base = OTHER; note = 2'-O-methoxy-ethyl modified thymine with phosphorothioate linkage
  modified_base 14: mod_base = OTHER; note = 2'-O-methoxy-ethyl modified nucleotide with phosphorothioate linkage
  modified_base 15: mod_base = OTHER; note = 2'-O-methoxy-ethyl modified nucleotide with phosphorothioate linkage
  modified_base 16: mod_base = OTHER; note = 2'-O-methoxy-ethyl modified nucleotide with phosphorothioate linkage
  modified_base 17: mod_base = OTHER; note = 2'-O-methoxy-ethyl modified thymine with phosphorothioate linkage
  modified_base 18: mod_base = OTHER; note = 2'-O-methoxy-ethyl modified nucleotide with phosphorothioate linkage
  modified_base 19: mod_base = OTHER; note = 2'-O-methoxy-ethyl modified nucleotide with phosphorothioate linkage
  modified_base 20: mod_base = OTHER; note = 2'-O-methoxy-ethyl modified nucleotide
taaattttagtttggctgaa

SEQ ID NO: 427 - RNA, 20 nt, synthetic construct
  source 1..20: mol_type = other RNA
  modified_base 1: mod_base = OTHER; note = 2'-O-methoxy-ethyl modified thymine with phosphorothioate linkage
  modified_base 2: mod_base = OTHER; note = 2'-O-methoxy-ethyl modified nucleotide with phosphorothioate linkage
  modified_base 3: mod_base = OTHER; note = 2'-O-methoxy-ethyl modified nucleotide with phosphorothioate linkage
  modified_base 4: mod_base = OTHER; note = Locked nucleotide with phosphorothioate linkage
  modified_base 5: mod_base = OTHER; note = 2'-O-methoxy-ethyl modified thymine with phosphorothioate linkage
  modified_base 6: mod_base = OTHER; note = 2'-O-methoxy-ethyl modified thymine with phosphorothioate linkage
  modified_base 7: mod_base = OTHER; note = 2'-O-methoxy-ethyl modified thymine with phosphorothioate linkage
  modified_base 8: mod_base = OTHER; note = 2'-O-methoxy-ethyl modified thymine with phosphorothioate linkage
  modified_base 9: mod_base = OTHER; note = 2'-O-methoxy-ethyl modified nucleotide with phosphorothioate linkage
  modified_base 10: mod_base = OTHER; note = 2'-O-methoxy-ethyl modified nucleotide with phosphorothioate linkage
  modified_base 11: mod_base = OTHER; note = 2'-O-methoxy-ethyl modified thymine with phosphorothioate linkage
  modified_base 12: mod_base = OTHER; note = 2'-O-methoxy-ethyl modified thymine with phosphorothioate linkage
  modified_base 13: mod_base = OTHER; note = 2'-O-methoxy-ethyl modified thymine with phosphorothioate linkage
  modified_base 14: mod_base = OTHER; note = 2'-O-methoxy-ethyl modified nucleotide with phosphorothioate linkage
  modified_base 15: mod_base = OTHER; note = 2'-O-methoxy-ethyl modified nucleotide with phosphorothioate linkage
  modified_base 16: mod_base = OTHER; note = 2'-O-methoxy-ethyl modified nucleotide with phosphorothioate linkage
  modified_base 17: mod_base = OTHER; note = 2'-O-methoxy-ethyl modified thymine with phosphorothioate linkage
  modified_base 18: mod_base = OTHER; note = 2'-O-methoxy-ethyl modified nucleotide with phosphorothioate linkage
  modified_base 19: mod_base = OTHER; note = 2'-O-methoxy-ethyl modified nucleotide with phosphorothioate linkage
  modified_base 20: mod_base = OTHER; note = 2'-O-methoxy-ethyl modified nucleotide
taaattttagtttggctgaa

SEQ ID NO: 428 - RNA, 20 nt, synthetic construct
  source 1..20: mol_type = other RNA
  modified_base 1: mod_base = OTHER; note = 2'-O-methoxy-ethyl modified thymine with phosphorothioate linkage
  modified_base 2: mod_base = OTHER; note = 2'-O-methoxy-ethyl modified nucleotide with phosphorothioate linkage
  modified_base 3: mod_base = OTHER; note = 2'-O-methoxy-ethyl modified nucleotide with phosphorothioate linkage
  modified_base 4: mod_base = OTHER; note = 2'-O-methoxy-ethyl modified nucleotide with phosphorothioate linkage
  modified_base 5: mod_base = OTHER; note = Locked thymine with phosphorothioate linkage
  modified_base 6: mod_base = OTHER; note = 2'-O-methoxy-ethyl modified thymine with phosphorothioate linkage
  modified_base 7: mod_base = OTHER; note = 2'-O-methoxy-ethyl modified thymine with phosphorothioate linkage
  modified_base 8: mod_base = OTHER; note = 2'-O-methoxy-ethyl modified thymine with phosphorothioate linkage
  modified_base 9: mod_base = OTHER; note = 2'-O-methoxy-ethyl modified nucleotide with phosphorothioate linkage
  modified_base 10: mod_base = OTHER; note = 2'-O-methoxy-ethyl modified nucleotide with phosphorothioate linkage
  modified_base 11: mod_base = OTHER; note = 2'-O-methoxy-ethyl modified thymine with phosphorothioate linkage
  modified_base 12: mod_base = OTHER; note = 2'-O-methoxy-ethyl modified thymine with phosphorothioate linkage
  modified_base 13: mod_base = OTHER; note = 2'-O-methoxy-ethyl modified thymine with phosphorothioate linkage
  modified_base 14: mod_base = OTHER; note = 2'-O-methoxy-ethyl modified nucleotide with phosphorothioate linkage
  modified_base 15: mod_base = OTHER; note = 2'-O-methoxy-ethyl modified nucleotide with phosphorothioate linkage
  modified_base 16: mod_base = OTHER; note = 2'-O-methoxy-ethyl modified nucleotide with phosphorothioate linkage
  modified_base 17: mod_base = OTHER; note = 2'-O-methoxy-ethyl modified thymine with phosphorothioate linkage
  modified_base 18: mod_base = OTHER; note = 2'-O-methoxy-ethyl modified nucleotide with phosphorothioate linkage
  modified_base 19: mod_base = OTHER; note = 2'-O-methoxy-ethyl modified nucleotide with phosphorothioate linkage
  modified_base 20: mod_base = OTHER; note = 2'-O-methoxy-ethyl modified nucleotide
taaattttagtttggctgaa

SEQ ID NO: 429 - RNA, 20 nt, synthetic construct
  source 1..20: mol_type = other RNA
  modified_base 1: mod_base = OTHER; note = 2'-O-methoxy-ethyl modified thymine with phosphorothioate linkage
  modified_base 2: mod_base = OTHER; note = 2'-O-methoxy-ethyl modified nucleotide with phosphorothioate linkage
  modified_base 3: mod_base = OTHER; note = 2'-O-methoxy-ethyl modified nucleotide with phosphorothioate linkage
  modified_base 4: mod_base = OTHER; note = 2'-O-methoxy-ethyl modified nucleotide with phosphorothioate linkage
  modified_base 5: mod_base = OTHER; note = 2'-O-methoxy-ethyl modified thymine with phosphorothioate linkage
  modified_base 6: mod_base = OTHER; note = Locked thymine with phosphorothioate linkage
  modified_base 7: mod_base = OTHER; note = 2'-O-methoxy-ethyl modified thymine with phosphorothioate linkage
  modified_base 8: mod_base = OTHER; note = 2'-O-methoxy-ethyl modified thymine with phosphorothioate linkage
  modified_base 9: mod_base = OTHER; note = 2'-O-methoxy-ethyl modified nucleotide with phosphorothioate linkage
  modified_base 10: mod_base = OTHER; note = 2'-O-methoxy-ethyl modified nucleotide with phosphorothioate linkage
  modified_base 11: mod_base = OTHER; note = 2'-O-methoxy-ethyl modified thymine with phosphorothioate linkage
  modified_base 12: mod_base = OTHER; note = 2'-O-methoxy-ethyl modified thymine with phosphorothioate linkage
  modified_base 13: mod_base = OTHER; note = 2'-O-methoxy-ethyl modified thymine with phosphorothioate linkage
  modified_base 14: mod_base = OTHER; note = 2'-O-methoxy-ethyl modified nucleotide with phosphorothioate linkage
  modified_base 15: mod_base = OTHER; note = 2'-O-methoxy-ethyl modified nucleotide with phosphorothioate linkage
  modified_base 16: mod_base = OTHER; note = 2'-O-methoxy-ethyl modified nucleotide with phosphorothioate linkage
  modified_base 17: mod_base = OTHER; note = 2'-O-methoxy-ethyl modified thymine with phosphorothioate linkage
  modified_base 18: mod_base = OTHER; note = 2'-O-methoxy-ethyl modified nucleotide with phosphorothioate linkage
  modified_base 19: mod_base = OTHER; note = 2'-O-methoxy-ethyl modified nucleotide with phosphorothioate linkage
  modified_base 20: mod_base = OTHER; note = 2'-O-methoxy-ethyl modified nucleotide
taaattttagtttggctgaa

SEQ ID NO: 430 - RNA, 20 nt, synthetic construct
  source 1..20: mol_type = other RNA
  modified_base 1: mod_base = OTHER; note = 2'-O-methoxy-ethyl modified thymine with phosphorothioate linkage
  modified_base 2: mod_base = OTHER; note = 2'-O-methoxy-ethyl modified nucleotide with phosphorothioate linkage
  modified_base 3: mod_base = OTHER; note = 2'-O-methoxy-ethyl modified nucleotide with phosphorothioate linkage
  modified_base 4: mod_base = OTHER; note = 2'-O-methoxy-ethyl modified nucleotide with phosphorothioate linkage
  modified_base 5: mod_base = OTHER; note = 2'-O-methoxy-ethyl modified thymine with phosphorothioate linkage
  modified_base 6: mod_base = OTHER; note = 2'-O-methoxy-ethyl modified thymine with phosphorothioate linkage
  modified_base 7: mod_base = OTHER; note = Locked thymine with phosphorothioate linkage
  modified_base 8: mod_base = OTHER; note = 2'-O-methoxy-ethyl modified thymine with phosphorothioate linkage
  modified_base 9: mod_base = OTHER; note = 2'-O-methoxy-ethyl modified nucleotide with phosphorothioate linkage
  modified_base 10: mod_base = OTHER; note = 2'-O-methoxy-ethyl modified nucleotide with phosphorothioate linkage
  modified_base 11: mod_base = OTHER; note = 2'-O-methoxy-ethyl modified thymine with phosphorothioate linkage
  modified_base 12: mod_base = OTHER; note = 2'-O-methoxy-ethyl modified thymine with phosphorothioate linkage
  modified_base 13: mod_base = OTHER; note = 2'-O-methoxy-ethyl modified thymine with phosphorothioate linkage
  modified_base 14: mod_base = OTHER; note = 2'-O-methoxy-ethyl modified nucleotide with phosphorothioate linkage
  modified_base 15: mod_base = OTHER; note = 2'-O-methoxy-ethyl modified nucleotide with phosphorothioate linkage
  modified_base 16: mod_base = OTHER; note = 2'-O-methoxy-ethyl modified nucleotide with phosphorothioate linkage
  modified_base 17: mod_base = OTHER; note = 2'-O-methoxy-ethyl modified thymine with phosphorothioate linkage
  modified_base 18: mod_base = OTHER; note = 2'-O-methoxy-ethyl modified nucleotide with phosphorothioate linkage
  modified_base 19: mod_base = OTHER; note = 2'-O-methoxy-ethyl modified nucleotide with phosphorothioate linkage
  modified_base 20: mod_base = OTHER; note = 2'-O-methoxy-ethyl modified nucleotide
taaattttagtttggctgaa

SEQ ID NO: 431 - RNA, 20 nt, synthetic construct
  source 1..20: mol_type = other RNA
  modified_base 1: mod_base = OTHER; note = 2'-O-methoxy-ethyl modified thymine with phosphorothioate linkage
  modified_base 2: mod_base = OTHER; note = 2'-O-methoxy-ethyl modified nucleotide with phosphorothioate linkage
  modified_base 3: mod_base = OTHER; note = 2'-O-methoxy-ethyl modified nucleotide with phosphorothioate linkage
  modified_base 4: mod_base = OTHER; note = 2'-O-methoxy-ethyl modified nucleotide with phosphorothioate linkage
  modified_base 5: mod_base = OTHER; note = 2'-O-methoxy-ethyl modified thymine with phosphorothioate linkage
  modified_base 6: mod_base = OTHER; note = 2'-O-methoxy-ethyl modified thymine with phosphorothioate linkage
  modified_base 7: mod_base = OTHER; note = 2'-O-methoxy-ethyl modified thymine with phosphorothioate linkage
  modified_base 8: mod_base = OTHER; note = Locked thymine with phosphorothioate linkage
  modified_base 9: mod_base = OTHER; note = 2'-O-methoxy-ethyl modified nucleotide with phosphorothioate linkage
  modified_base 10: mod_base = OTHER; note = 2'-O-methoxy-ethyl modified nucleotide with phosphorothioate linkage
  modified_base 11: mod_base = OTHER; note = 2'-O-methoxy-ethyl modified thymine with phosphorothioate linkage
  modified_base 12: mod_base = OTHER; note = 2'-O-methoxy-ethyl modified thymine with phosphorothioate linkage
  modified_base 13: mod_base = OTHER; note = 2'-O-methoxy-ethyl modified thymine with phosphorothioate linkage
  modified_base 14: mod_base = OTHER; note = 2'-O-methoxy-ethyl modified nucleotide with phosphorothioate linkage
  modified_base 15: mod_base = OTHER; note = 2'-O-methoxy-ethyl modified nucleotide with phosphorothioate linkage
  modified_base 16: mod_base = OTHER; note = 2'-O-methoxy-ethyl modified nucleotide with phosphorothioate linkage
  modified_base 17: mod_base = OTHER; note = 2'-O-methoxy-ethyl modified thymine with phosphorothioate linkage
  modified_base 18: mod_base = OTHER; note = 2'-O-methoxy-ethyl modified nucleotide with phosphorothioate linkage
  modified_base 19: mod_base = OTHER; note = 2'-O-methoxy-ethyl modified nucleotide with phosphorothioate linkage
  modified_base 20: mod_base = OTHER; note = 2'-O-methoxy-ethyl modified nucleotide
taaattttagtttggctgaa

SEQ ID NO: 432 - RNA, 20 nt, synthetic construct
  source 1..20: mol_type = other RNA
  modified_base 1: mod_base = OTHER; note = 2'-O-methoxy-ethyl modified thymine with phosphorothioate linkage
  modified_base 2: mod_base = OTHER; note = 2'-O-methoxy-ethyl modified nucleotide with phosphorothioate linkage
  modified_base 3: mod_base = OTHER; note = 2'-O-methoxy-ethyl modified nucleotide with phosphorothioate linkage
  modified_base 4: mod_base = OTHER; note = 2'-O-methoxy-ethyl modified nucleotide with phosphorothioate linkage
  modified_base 5: mod_base = OTHER; note = 2'-O-methoxy-ethyl modified thymine with phosphorothioate linkage
  modified_base 6: mod_base = OTHER; note = 2'-O-methoxy-ethyl modified thymine with phosphorothioate linkage
  modified_base 7: mod_base = OTHER; note = 2'-O-methoxy-ethyl modified thymine with phosphorothioate linkage
  modified_base 8: mod_base = OTHER; note = 2'-O-methoxy-ethyl modified thymine with phosphorothioate linkage
  modified_base 9: mod_base = OTHER; note = Locked nucleotide with phosphorothioate linkage
  modified_base 10: mod_base = OTHER; note = 2'-O-methoxy-ethyl modified nucleotide with phosphorothioate linkage
  modified_base 11: mod_base = OTHER; note = 2'-O-methoxy-ethyl modified thymine with phosphorothioate linkage
  modified_base 12: mod_base = OTHER; note = 2'-O-methoxy-ethyl modified thymine with phosphorothioate linkage
  modified_base 13: mod_base = OTHER; note = 2'-O-methoxy-ethyl modified thymine with phosphorothioate linkage
  modified_base 14: mod_base = OTHER; note = 2'-O-methoxy-ethyl modified nucleotide with phosphorothioate linkage
  modified_base 15: mod_base = OTHER; note = 2'-O-methoxy-ethyl modified nucleotide with phosphorothioate linkage
  modified_base 16: mod_base = OTHER; note = 2'-O-methoxy-ethyl modified nucleotide with phosphorothioate linkage
  modified_base 17: mod_base = OTHER; note = 2'-O-methoxy-ethyl modified thymine with phosphorothioate linkage
  modified_base 18: mod_base = OTHER; note = 2'-O-methoxy-ethyl modified nucleotide with phosphorothioate linkage
  modified_base 19: mod_base = OTHER; note = 2'-O-methoxy-ethyl modified nucleotide with phosphorothioate linkage
  modified_base 20: mod_base = OTHER; note = 2'-O-methoxy-ethyl modified nucleotide
taaattttagtttggctgaa

SEQ ID NO: 433 - RNA, 20 nt, synthetic construct
  source 1..20: mol_type = other RNA
  modified_base 1: mod_base = OTHER; note = 2'-O-methoxy-ethyl modified thymine with phosphorothioate linkage
  modified_base 2: mod_base = OTHER; note = 2'-O-methoxy-ethyl modified nucleotide with phosphorothioate linkage
  modified_base 3: mod_base = OTHER; note = 2'-O-methoxy-ethyl modified nucleotide with phosphorothioate linkage
  modified_base 4: mod_base = OTHER; note = 2'-O-methoxy-ethyl modified nucleotide with phosphorothioate linkage
  modified_base 5: mod_base = OTHER; note = 2'-O-methoxy-ethyl modified thymine with phosphorothioate linkage
  modified_base 6: mod_base = OTHER; note = 2'-O-methoxy-ethyl modified thymine with phosphorothioate linkage
  modified_base 7: mod_base = OTHER; note = 2'-O-methoxy-ethyl modified thymine with phosphorothioate linkage
  modified_base 8: mod_base = OTHER; note = 2'-O-methoxy-ethyl modified thymine with phosphorothioate linkage
  modified_base 9: mod_base = OTHER; note = 2'-O-methoxy-ethyl modified nucleotide with phosphorothioate linkage
  modified_base 10: mod_base = OTHER; note = Locked nucleotide with phosphorothioate linkage
  modified_base 11: mod_base = OTHER; note = 2'-O-methoxy-ethyl modified thymine with phosphorothioate linkage
  modified_base 12: mod_base = OTHER; note = 2'-O-methoxy-ethyl modified thymine with phosphorothioate linkage
  modified_base 13: mod_base = OTHER; note = 2'-O-methoxy-ethyl modified thymine with phosphorothioate linkage
  modified_base 14: mod_base = OTHER; note = 2'-O-methoxy-ethyl modified nucleotide with phosphorothioate linkage
  modified_base 15: mod_base = OTHER; note = 2'-O-methoxy-ethyl modified nucleotide with phosphorothioate linkage
  modified_base 16: mod_base = OTHER; note = 2'-O-methoxy-ethyl modified nucleotide with phosphorothioate linkage
  modified_base 17: mod_base = OTHER; note = 2'-O-methoxy-ethyl modified thymine with phosphorothioate linkage
  modified_base 18: mod_base = OTHER; note = 2'-O-methoxy-ethyl modified nucleotide with phosphorothioate linkage
  modified_base 19: mod_base = OTHER; note = 2'-O-methoxy-ethyl modified nucleotide with phosphorothioate linkage
  modified_base 20: mod_base = OTHER; note = 2'-O-methoxy-ethyl modified nucleotide
taaattttagtttggctgaa

SEQ ID NO: 434 - RNA, 20 nt, synthetic construct
  source 1..20: mol_type = other RNA
  modified_base 1: mod_base = OTHER; note = 2'-O-methoxy-ethyl modified thymine with phosphorothioate linkage
  modified_base 2: mod_base = OTHER; note = 2'-O-methoxy-ethyl modified nucleotide with phosphorothioate linkage
  modified_base 3: mod_base = OTHER; note = 2'-O-methoxy-ethyl modified nucleotide with phosphorothioate linkage
  modified_base 4: mod_base = OTHER; note = 2'-O-methoxy-ethyl modified nucleotide with phosphorothioate linkage
  modified_base 5: mod_base = OTHER; note = 2'-O-methoxy-ethyl modified thymine with phosphorothioate linkage
  modified_base 6: mod_base = OTHER; note = 2'-O-methoxy-ethyl modified thymine with phosphorothioate linkage
  modified_base 7: mod_base = OTHER; note = 2'-O-methoxy-ethyl modified thymine with phosphorothioate linkage
  modified_base 8: mod_base = OTHER; note = 2'-O-methoxy-ethyl modified thymine with phosphorothioate linkage
  modified_base 9: mod_base = OTHER; note = 2'-O-methoxy-ethyl modified nucleotide with phosphorothioate linkage
  modified_base 10: mod_base = OTHER; note = 2'-O-methoxy-ethyl modified nucleotide with phosphorothioate linkage
  modified_base 11: mod_base = OTHER; note = Locked thymine with phosphorothioate linkage
  modified_base 12: mod_base = OTHER; note = 2'-O-methoxy-ethyl modified thymine with phosphorothioate linkage
  modified_base 13: mod_base = OTHER; note = 2'-O-methoxy-ethyl modified thymine with phosphorothioate linkage
  modified_base 14: mod_base = OTHER; note = 2'-O-methoxy-ethyl modified nucleotide with phosphorothioate linkage
  modified_base 15: mod_base = OTHER; note = 2'-O-methoxy-ethyl modified nucleotide with phosphorothioate linkage
  modified_base 16: mod_base = OTHER; note = 2'-O-methoxy-ethyl modified nucleotide with phosphorothioate linkage
  modified_base 17: mod_base = OTHER; note = 2'-O-methoxy-ethyl modified thymine with phosphorothioate linkage
  modified_base 18: mod_base = OTHER; note = 2'-O-methoxy-ethyl modified nucleotide with phosphorothioate linkage
  modified_base 19: mod_base = OTHER; note = 2'-O-methoxy-ethyl modified nucleotide with phosphorothioate linkage
  modified_base 20: mod_base = OTHER; note = 2'-O-methoxy-ethyl modified nucleotide
taaattttagtttggctgaa

SEQ ID NO: 435 - RNA, 20 nt, synthetic construct
  source 1..20: mol_type = other RNA
  modified_base 1: mod_base = OTHER; note = 2'-O-methoxy-ethyl modified thymine with phosphorothioate linkage
  modified_base 2: mod_base = OTHER; note = 2'-O-methoxy-ethyl modified nucleotide with phosphorothioate linkage
  modified_base 3: mod_base = OTHER; note = 2'-O-methoxy-ethyl modified nucleotide with phosphorothioate linkage
  modified_base 4: mod_base = OTHER; note = 2'-O-methoxy-ethyl modified nucleotide with phosphorothioate linkage
  modified_base 5: mod_base = OTHER; note = 2'-O-methoxy-ethyl modified thymine with phosphorothioate linkage
  modified_base 6: mod_base = OTHER; note = 2'-O-methoxy-ethyl modified thymine with phosphorothioate linkage
  modified_base 7: mod_base = OTHER; note = 2'-O-methoxy-ethyl modified thymine with phosphorothioate linkage
  modified_base 8: mod_base = OTHER; note = 2'-O-methoxy-ethyl modified thymine with phosphorothioate linkage
  modified_base 9: mod_base = OTHER; note = 2'-O-methoxy-ethyl modified nucleotide with phosphorothioate linkage
  modified_base 10: mod_base = OTHER; note = 2'-O-methoxy-ethyl modified nucleotide with phosphorothioate linkage
  modified_base 11: mod_base = OTHER; note = 2'-O-methoxy-ethyl modified thymine with phosphorothioate linkage
  modified_base 12: mod_base = OTHER; note = Locked thymine with phosphorothioate linkage
  modified_base 13: mod_base = OTHER; note = 2'-O-methoxy-ethyl modified thymine with phosphorothioate linkage
  modified_base 14: mod_base = OTHER; note = 2'-O-methoxy-ethyl modified nucleotide with phosphorothioate linkage
  modified_base 15: mod_base = OTHER; note = 2'-O-methoxy-ethyl modified nucleotide with phosphorothioate linkage
  modified_base 16: mod_base = OTHER; note = 2'-O-methoxy-ethyl modified nucleotide with phosphorothioate linkage
  modified_base 17: mod_base = OTHER; note = 2'-O-methoxy-ethyl modified thymine with phosphorothioate linkage
  modified_base 18: mod_base = OTHER; note = 2'-O-methoxy-ethyl modified nucleotide with phosphorothioate linkage
  modified_base 19: mod_base = OTHER; note = 2'-O-methoxy-ethyl modified nucleotide with phosphorothioate linkage
  modified_base 20: mod_base = OTHER; note = 2'-O-methoxy-ethyl modified nucleotide
taaattttagtttggctgaa

SEQ ID NO: 436 - RNA, 20 nt, synthetic construct
  source 1..20: mol_type = other RNA
  modified_base 1: mod_base = OTHER; note = 2'-O-methoxy-ethyl modified thymine with phosphorothioate linkage
  modified_base 2: mod_base = OTHER; note = 2'-O-methoxy-ethyl modified nucleotide with phosphorothioate linkage
  modified_base 3: mod_base = OTHER; note = 2'-O-methoxy-ethyl modified nucleotide with phosphorothioate linkage
  modified_base 4: mod_base = OTHER; note = 2'-O-methoxy-ethyl modified nucleotide with phosphorothioate linkage
  modified_base 5: mod_base = OTHER; note = 2'-O-methoxy-ethyl modified thymine with phosphorothioate linkage
  modified_base 6: mod_base = OTHER; note = 2'-O-methoxy-ethyl modified thymine with phosphorothioate linkage
  modified_base 7: mod_base = OTHER; note = 2'-O-methoxy-ethyl modified thymine with phosphorothioate linkage
  modified_base 8: mod_base = OTHER; note = 2'-O-methoxy-ethyl modified thymine with phosphorothioate linkage
  modified_base 9: mod_base = OTHER; note = 2'-O-methoxy-ethyl modified nucleotide with phosphorothioate linkage
  modified_base 10: mod_base = OTHER; note = 2'-O-methoxy-ethyl modified nucleotide with phosphorothioate linkage
  modified_base 11: mod_base = OTHER; note = 2'-O-methoxy-ethyl modified thymine with phosphorothioate linkage
  modified_base 12: mod_base = OTHER; note = 2'-O-methoxy-ethyl modified thymine with phosphorothioate linkage
  modified_base 13: mod_base = OTHER; note = Locked thymine with phosphorothioate linkage
  modified_base 14: mod_base = OTHER; note = 2'-O-methoxy-ethyl modified nucleotide with phosphorothioate linkage
  modified_base 15: mod_base = OTHER; note = 2'-O-methoxy-ethyl modified nucleotide with phosphorothioate linkage
  modified_base 16: mod_base = OTHER; note = 2'-O-methoxy-ethyl modified nucleotide with phosphorothioate linkage
  modified_base 17: mod_base = OTHER; note = 2'-O-methoxy-ethyl modified thymine with phosphorothioate linkage
  modified_base 18: mod_base = OTHER; note = 2'-O-methoxy-ethyl modified nucleotide with phosphorothioate linkage
  modified_base 19: mod_base = OTHER; note = 2'-O-methoxy-ethyl modified nucleotide with phosphorothioate linkage
  modified_base 20: mod_base = OTHER; note = 2'-O-methoxy-ethyl modified nucleotide
taaattttagtttggctgaa

SEQ ID NO: 437 - RNA, 20 nt, synthetic construct
  source 1..20: mol_type = other RNA
  modified_base 1: mod_base = OTHER; note = 2'-O-methoxy-ethyl modified thymine with phosphorothioate linkage
  modified_base 2: mod_base = OTHER; note = 2'-O-methoxy-ethyl modified nucleotide with phosphorothioate linkage
  modified_base 3: mod_base = OTHER; note = 2'-O-methoxy-ethyl modified nucleotide with phosphorothioate linkage
  modified_base 4: mod_base = OTHER; note = 2'-O-methoxy-ethyl modified nucleotide with phosphorothioate linkage
  modified_base 5: mod_base = OTHER; note = 2'-O-methoxy-ethyl modified thymine with phosphorothioate linkage
  modified_base 6: mod_base = OTHER; note = 2'-O-methoxy-ethyl modified thymine with phosphorothioate linkage
  modified_base 7: mod_base = OTHER; note = 2'-O-methoxy-ethyl modified thymine with phosphorothioate linkage
  modified_base 8: mod_base = OTHER; note = 2'-O-methoxy-ethyl modified thymine with phosphorothioate linkage
  modified_base 9: mod_base = OTHER; note = 2'-O-methoxy-ethyl modified nucleotide with phosphorothioate linkage
  modified_base 10: mod_base = OTHER; note = 2'-O-methoxy-ethyl modified nucleotide with phosphorothioate linkage
  modified_base 11: mod_base = OTHER; note = 2'-O-methoxy-ethyl modified thymine with phosphorothioate linkage
  modified_base 12: mod_base = OTHER; note = 2'-O-methoxy-ethyl modified thymine with phosphorothioate linkage
  modified_base 13: mod_base = OTHER; note = 2'-O-methoxy-ethyl modified thymine with phosphorothioate linkage
  modified_base 14: mod_base = OTHER; note = Locked nucleotide with phosphorothioate linkage
  modified_base 15: mod_base = OTHER; note = 2'-O-methoxy-ethyl modified nucleotide with phosphorothioate linkage
  modified_base 16: mod_base = OTHER; note = 2'-O-methoxy-ethyl modified nucleotide with phosphorothioate linkage
  modified_base 17: mod_base = OTHER; note = 2'-O-methoxy-ethyl modified thymine with phosphorothioate linkage
  modified_base 18: mod_base = OTHER; note = 2'-O-methoxy-ethyl modified nucleotide with phosphorothioate linkage
  modified_base 19: mod_base = OTHER; note = 2'-O-methoxy-ethyl modified nucleotide with phosphorothioate linkage
  modified_base 20: mod_base = OTHER; note = 2'-O-methoxy-ethyl modified nucleotide
taaattttagtttggctgaa

SEQ ID NO: 438 - RNA, 20 nt, synthetic construct
  source 1..20: mol_type = other RNA
  modified_base 1: mod_base = OTHER; note = 2'-O-methoxy-ethyl modified thymine with phosphorothioate linkage
  modified_base 2: mod_base = OTHER; note = 2'-O-methoxy-ethyl modified nucleotide with phosphorothioate linkage
  modified_base 3: mod_base = OTHER; note = 2'-O-methoxy-ethyl modified nucleotide with phosphorothioate linkage
  modified_base 4: mod_base = OTHER; note = 2'-O-methoxy-ethyl modified nucleotide with phosphorothioate linkage
  modified_base 5: mod_base = OTHER; note = 2'-O-methoxy-ethyl modified thymine with phosphorothioate linkage
  modified_base 6: mod_base = OTHER; note = 2'-O-methoxy-ethyl modified thymine with phosphorothioate linkage
  modified_base 7: mod_base = OTHER; note = 2'-O-methoxy-ethyl modified thymine with phosphorothioate linkage
  modified_base 8: mod_base = OTHER; note = 2'-O-methoxy-ethyl modified thymine with phosphorothioate linkage
  modified_base 9: mod_base = OTHER; note = 2'-O-methoxy-ethyl modified nucleotide with phosphorothioate linkage
  modified_base 10: mod_base = OTHER; note = 2'-O-methoxy-ethyl modified nucleotide with phosphorothioate linkage
  modified_base 11: mod_base = OTHER; note = 2'-O-methoxy-ethyl modified thymine with phosphorothioate linkage
  modified_base 12: mod_base = OTHER; note = 2'-O-methoxy-ethyl modified thymine with phosphorothioate linkage
  modified_base 13: mod_base = OTHER; note = 2'-O-methoxy-ethyl modified thymine with phosphorothioate linkage
  modified_base 14: mod_base = OTHER; note = 2'-O-methoxy-ethyl modified nucleotide with phosphorothioate linkage
  modified_base 15: mod_base = OTHER; note = Locked nucleotide with phosphorothioate linkage
  modified_base 16: mod_base = OTHER; note = 2'-O-methoxy-ethyl modified nucleotide with phosphorothioate linkage
  modified_base 17: mod_base = OTHER; note = 2'-O-methoxy-ethyl modified thymine with phosphorothioate linkage
  modified_base 18: mod_base = OTHER; note = 2'-O-methoxy-ethyl modified nucleotide with phosphorothioate linkage
  modified_base 19: mod_base = OTHER; note = 2'-O-methoxy-ethyl modified nucleotide with phosphorothioate linkage
  modified_base 20: mod_base = OTHER; note = 2'-O-methoxy-ethyl modified nucleotide
taaattttagtttggctgaa

SEQ ID NO: 439 - RNA, 20 nt, synthetic construct
  source 1..20: mol_type = other RNA
  modified_base 1: mod_base = OTHER; note = 2'-O-methoxy-ethyl modified thymine with phosphorothioate linkage
  modified_base 2: mod_base = OTHER; note = 2'-O-methoxy-ethyl modified nucleotide with phosphorothioate linkage
  modified_base 3: mod_base = OTHER; note = 2'-O-methoxy-ethyl modified nucleotide with phosphorothioate linkage
  modified_base 4: mod_base = OTHER; note = 2'-O-methoxy-ethyl modified nucleotide with phosphorothioate linkage
  modified_base 5: mod_base = OTHER; note = 2'-O-methoxy-ethyl modified thymine with phosphorothioate linkage
  modified_base 6: mod_base = OTHER; note = 2'-O-methoxy-ethyl modified thymine with phosphorothioate linkage
  modified_base 7: mod_base = OTHER; note = 2'-O-methoxy-ethyl modified thymine with phosphorothioate linkage
  modified_base 8: mod_base = OTHER; note = 2'-O-methoxy-ethyl modified thymine with phosphorothioate linkage
  modified_base 9: mod_base = OTHER; note = 2'-O-methoxy-ethyl modified nucleotide with phosphorothioate linkage
  modified_base 10: mod_base = OTHER; note = 2'-O-methoxy-ethyl modified nucleotide with phosphorothioate linkage
  modified_base 11: mod_base = OTHER; note = 2'-O-methoxy-ethyl modified thymine with phosphorothioate linkage
  modified_base 12: mod_base = OTHER; note = 2'-O-methoxy-ethyl modified thymine with phosphorothioate linkage
  modified_base 13: mod_base = OTHER; note = 2'-O-methoxy-ethyl modified thymine with phosphorothioate linkage
  modified_base 14: mod_base = OTHER; note = 2'-O-methoxy-ethyl modified nucleotide with phosphorothioate linkage
  modified_base 15: mod_base = OTHER; note = 2'-O-methoxy-ethyl modified nucleotide with phosphorothioate linkage
  modified_base 16: mod_base = OTHER; note = Locked nucleotide with phosphorothioate linkage
  modified_base 17: mod_base = OTHER; note = 2'-O-methoxy-ethyl modified thymine with phosphorothioate linkage
  modified_base 18: mod_base = OTHER; note = 2'-O-methoxy-ethyl modified nucleotide with phosphorothioate linkage
  modified_base 19: mod_base = OTHER; note = 2'-O-methoxy-ethyl modified nucleotide with phosphorothioate linkage
  modified_base 20: mod_base = OTHER; note = 2'-O-methoxy-ethyl modified nucleotide
taaattttagtttggctgaa

SEQ ID NO: 440 - RNA, 20 nt, synthetic construct
  source 1..20: mol_type = other RNA
  modified_base 1: mod_base = OTHER; note = 2'-O-methoxy-ethyl modified thymine with phosphorothioate linkage
  modified_base 2: mod_base = OTHER; note = 2'-O-methoxy-ethyl modified nucleotide with phosphorothioate linkage
  modified_base 3: mod_base = OTHER; note = 2'-O-methoxy-ethyl modified nucleotide with phosphorothioate linkage
  modified_base 4: mod_base = OTHER; note = 2'-O-methoxy-ethyl modified nucleotide with phosphorothioate linkage
  modified_base 5: mod_base = OTHER; note = 2'-O-methoxy-ethyl modified thymine with phosphorothioate linkage
  modified_base 6: mod_base = OTHER; note = 2'-O-methoxy-ethyl modified thymine with phosphorothioate linkage
  modified_base 7: mod_base = OTHER; note = 2'-O-methoxy-ethyl modified thymine with phosphorothioate linkage
  modified_base 8: mod_base = OTHER; note = 2'-O-methoxy-ethyl modified thymine with phosphorothioate linkage
  modified_base 9: mod_base = OTHER; note = 2'-O-methoxy-ethyl modified nucleotide with phosphorothioate linkage
  modified_base 10: mod_base = OTHER; note = 2'-O-methoxy-ethyl modified nucleotide with phosphorothioate linkage
  modified_base 11: mod_base = OTHER; note = 2'-O-methoxy-ethyl modified thymine with phosphorothioate linkage
  modified_base 12: mod_base = OTHER; note = 2'-O-methoxy-ethyl modified thymine with phosphorothioate linkage
  modified_base 13: mod_base = OTHER; note = 2'-O-methoxy-ethyl modified thymine with phosphorothioate linkage
  modified_base 14: mod_base = OTHER; note = 2'-O-methoxy-ethyl modified nucleotide with phosphorothioate linkage
  modified_base 15: mod_base = OTHER; note = 2'-O-methoxy-ethyl modified nucleotide with phosphorothioate linkage
  modified_base 16: mod_base = OTHER; note = 2'-O-methoxy-ethyl modified nucleotide with phosphorothioate linkage
  modified_base 17: mod_base = OTHER; note = Locked thymine with phosphorothioate linkage
  modified_base 18: mod_base = OTHER; note = 2'-O-methoxy-ethyl modified nucleotide with phosphorothioate linkage
  modified_base 19: mod_base = OTHER; note = 2'-O-methoxy-ethyl modified nucleotide with phosphorothioate linkage
  modified_base 20: mod_base = OTHER; note = 2'-O-methoxy-ethyl modified nucleotide
taaattttagtttggctgaa

SEQ ID NO: 441 - RNA, 20 nt, synthetic construct
  source 1..20: mol_type = other RNA
  modified_base 1: mod_base = OTHER; note = 2'-O-methoxy-ethyl modified thymine with phosphorothioate linkage
  modified_base 2: mod_base = OTHER; note = 2'-O-methoxy-ethyl modified nucleotide with phosphorothioate linkage
  modified_base 3: mod_base = OTHER; note = 2'-O-methoxy-ethyl modified nucleotide with phosphorothioate linkage
  modified_base 4: mod_base = OTHER; note = 2'-O-methoxy-ethyl modified nucleotide with phosphorothioate linkage
  modified_base 5: mod_base = OTHER; note = 2'-O-methoxy-ethyl modified thymine with phosphorothioate linkage
  modified_base 6: mod_base = OTHER; note = 2'-O-methoxy-ethyl modified thymine with phosphorothioate linkage
  modified_base 7: mod_base = OTHER; note = 2'-O-methoxy-ethyl modified thymine with phosphorothioate linkage
  modified_base 8: mod_base = OTHER; note = 2'-O-methoxy-ethyl modified thymine with phosphorothioate linkage
  modified_base 9: mod_base = OTHER; note = 2'-O-methoxy-ethyl modified nucleotide with phosphorothioate linkage
  modified_base 10: mod_base = OTHER; note = 2'-O-methoxy-ethyl modified nucleotide with phosphorothioate linkage
  modified_base 11: mod_base = OTHER; note = 2'-O-methoxy-ethyl modified thymine with phosphorothioate linkage
  modified_base 12: mod_base = OTHER; note = 2'-O-methoxy-ethyl modified thymine with phosphorothioate linkage
  modified_base 13: mod_base = OTHER; note = 2'-O-methoxy-ethyl modified thymine with phosphorothioate linkage
  modified_base 14: mod_base = OTHER; note = 2'-O-methoxy-ethyl modified nucleotide with phosphorothioate linkage
  modified_base 15: mod_base = OTHER; note = 2'-O-methoxy-ethyl modified nucleotide with phosphorothioate linkage
  modified_base 16: mod_base = OTHER; note = 2'-O-methoxy-ethyl modified nucleotide with phosphorothioate linkage
  modified_base 17: mod_base = OTHER; note = 2'-O-methoxy-ethyl modified thymine with phosphorothioate linkage
  modified_base 18: mod_base = OTHER; note = Locked nucleotide with phosphorothioate linkage
  modified_base 19: mod_base = OTHER; note = 2'-O-methoxy-ethyl modified nucleotide with phosphorothioate linkage
  modified_base 20: mod_base = OTHER; note = 2'-O-methoxy-ethyl modified nucleotide
taaattttagtttggctgaa

SEQ ID NO: 442 - RNA, 20 nt, synthetic construct
  source 1..20: mol_type = other RNA
  modified_base 1: mod_base = OTHER; note = 2'-O-methoxy-ethyl modified thymine with phosphorothioate linkage
  modified_base 2: mod_base = OTHER; note = 2'-O-methoxy-ethyl modified nucleotide with phosphorothioate linkage
  modified_base 3: mod_base = OTHER; note = 2'-O-methoxy-ethyl modified nucleotide with phosphorothioate linkage
  modified_base 4: mod_base = OTHER; note = 2'-O-methoxy-ethyl modified nucleotide with phosphorothioate linkage
  modified_base 5: mod_base = OTHER; note = 2'-O-methoxy-ethyl modified thymine with phosphorothioate linkage
  modified_base 6: mod_base = OTHER; note = 2'-O-methoxy-ethyl modified thymine with phosphorothioate linkage
  modified_base 7: mod_base = OTHER; note = 2'-O-methoxy-ethyl modified thymine with phosphorothioate linkage
  modified_base 8: mod_base = OTHER; note = 2'-O-methoxy-ethyl modified thymine with phosphorothioate linkage
  modified_base 9: mod_base = OTHER; note = 2'-O-methoxy-ethyl modified nucleotide with phosphorothioate linkage
  modified_base 10: mod_base = OTHER; note = 2'-O-methoxy-ethyl modified nucleotide with phosphorothioate linkage
  modified_base 11: mod_base = OTHER; note = 2'-O-methoxy-ethyl modified thymine with phosphorothioate linkage
  modified_base 12: mod_base = OTHER; note = 2'-O-methoxy-ethyl modified thymine with phosphorothioate linkage
  modified_base 13: mod_base = OTHER; note = 2'-O-methoxy-ethyl modified thymine with phosphorothioate linkage
  modified_base 14: mod_base = OTHER; note = 2'-O-methoxy-ethyl modified nucleotide with phosphorothioate linkage
  modified_base 15: mod_base = OTHER; note = 2'-O-methoxy-ethyl modified nucleotide with phosphorothioate linkage
  modified_base 16: mod_base = OTHER; note = 2'-O-methoxy-ethyl modified nucleotide with phosphorothioate linkage
  modified_base 17: mod_base = OTHER; note = 2'-O-methoxy-ethyl modified thymine with phosphorothioate linkage
  modified_base 18: mod_base = OTHER; note = 2'-O-methoxy-ethyl modified nucleotide with phosphorothioate linkage
  modified_base 19: mod_base = OTHER; note = Locked nucleotide with phosphorothioate linkage
  modified_base 20: mod_base = OTHER; note = 2'-O-methoxy-ethyl modified nucleotide
taaattttagtttggctgaa

SEQ ID NO: 443 - RNA, 20 nt, synthetic construct
  source 1..20: mol_type = other RNA
  modified_base 1: mod_base = OTHER; note = 2'-O-methoxy-ethyl modified thymine with phosphorothioate linkage
  modified_base 2: mod_base = OTHER; note = 2'-O-methoxy-ethyl modified nucleotide with phosphorothioate linkage
  modified_base 3: mod_base = OTHER; note = 2'-O-methoxy-ethyl modified nucleotide with phosphorothioate linkage
  modified_base 4: mod_base = OTHER; note = 2'-O-methoxy-ethyl modified nucleotide with phosphorothioate linkage
  modified_base 5: mod_base = OTHER; note = 2'-O-methoxy-ethyl modified thymine with phosphorothioate linkage
  modified_base 6: mod_base = OTHER; note = 2'-O-methoxy-ethyl modified thymine with phosphorothioate linkage
  modified_base 7: mod_base = OTHER; note = 2'-O-methoxy-ethyl modified thymine with phosphorothioate linkage
  modified_base 8: mod_base = OTHER; note = 2'-O-methoxy-ethyl modified thymine with phosphorothioate linkage
  modified_base 9: mod_base = OTHER; note = 2'-O-methoxy-ethyl modified nucleotide with phosphorothioate linkage
  modified_base 10: mod_base = OTHER; note = 2'-O-methoxy-ethyl modified nucleotide with phosphorothioate linkage
  modified_base 11: mod_base = OTHER; note = 2'-O-methoxy-ethyl modified thymine with phosphorothioate linkage
  modified_base 12: mod_base = OTHER; note = 2'-O-methoxy-ethyl modified thymine with phosphorothioate linkage
  modified_base 13: mod_base = OTHER; note = 2'-O-methoxy-ethyl modified thymine with phosphorothioate linkage
  modified_base 14: mod_base = OTHER; note = 2'-O-methoxy-ethyl modified nucleotide with phosphorothioate linkage
  modified_base 15: mod_base = OTHER; note = 2'-O-methoxy-ethyl modified nucleotide with phosphorothioate linkage
  modified_base 16: mod_base = OTHER; note = 2'-O-methoxy-ethyl modified nucleotide with phosphorothioate linkage
  modified_base 17: mod_base = OTHER; note = 2'-O-methoxy-ethyl modified thymine with phosphorothioate linkage
  modified_base 18: mod_base = OTHER; note = 2'-O-methoxy-ethyl modified nucleotide with phosphorothioate linkage
  modified_base 19: mod_base = OTHER; note = 2'-O-methoxy-ethyl modified nucleotide with phosphorothioate linkage
  modified_base 20: mod_base = OTHER; note = Locked nucleotide
taaattttagtttggctgaa

SEQ ID NO: 444 - RNA, 20 nt, synthetic construct
  source 1..20: mol_type = other RNA
  modified_base 1: mod_base = OTHER; note = Locked thymine with phosphorothioate linkage
  modified_base 2: mod_base = OTHER; note = 2'-O-methoxy-ethyl modified nucleotide with phosphorothioate linkage
  modified_base 3: mod_base = OTHER; note = 2'-O-methoxy-ethyl modified nucleotide with phosphorothioate linkage
  modified_base 4: mod_base = OTHER; note = 2'-O-methoxy-ethyl modified nucleotide with phosphorothioate linkage
  modified_base 5: mod_base = OTHER; note = 2'-O-methoxy-ethyl modified thymine with phosphorothioate linkage
  modified_base 6: mod_base = OTHER; note = 2'-O-methoxy-ethyl modified thymine with phosphorothioate linkage
  modified_base 7: mod_base = OTHER; note = 2'-O-methoxy-ethyl modified thymine with phosphorothioate linkage
  modified_base 8: mod_base = OTHER; note = 2'-O-methoxy-ethyl modified thymine with phosphorothioate linkage
  modified_base 9: mod_base = OTHER; note = 2'-O-methoxy-ethyl modified nucleotide with phosphorothioate linkage
  modified_base 10: mod_base = OTHER; note = 2'-O-methoxy-ethyl modified nucleotide with phosphorothioate linkage
  modified_base 11: mod_base = OTHER; note = 2'-O-methoxy-ethyl modified thymine with phosphorothioate linkage
  modified_base 12: mod_base = OTHER; note = 2'-O-methoxy-ethyl modified thymine with phosphorothioate linkage
  modified_base 13: mod_base = OTHER; note = 2'-O-methoxy-ethyl modified thymine with phosphorothioate linkage
  modified_base 14: mod_base = OTHER; note = 2'-O-methoxy-ethyl modified nucleotide with phosphorothioate linkage
  modified_base 15: mod_base = OTHER; note = 2'-O-methoxy-ethyl modified nucleotide with phosphorothioate linkage
  modified_base 16: mod_base = OTHER; note = 2'-O-methoxy-ethyl modified nucleotide with phosphorothioate linkage
  modified_base 17: mod_base = OTHER; note = 2'-O-methoxy-ethyl modified thymine with phosphorothioate linkage
  modified_base 18: mod_base = OTHER; note = 2'-O-methoxy-ethyl modified nucleotide with phosphorothioate linkage
  modified_base 19: mod_base = OTHER; note = 2'-O-methoxy-ethyl modified nucleotide with phosphorothioate linkage
  modified_base 20: mod_base = OTHER; note = Locked nucleotide
taaattttagtttggctgaa

SEQ ID NO: 445 - RNA, 20 nt, synthetic construct
  source 1..20: mol_type = other RNA
  modified_base 1: mod_base = OTHER; note = 2'-O-methoxy-ethyl modified thymine with phosphorothioate linkage
  modified_base 2: mod_base = OTHER; note = Locked nucleotide with phosphorothioate linkage
  modified_base 3: mod_base = OTHER; note = 2'-O-methoxy-ethyl modified nucleotide with phosphorothioate linkage
  modified_base 4: mod_base = OTHER; note = 2'-O-methoxy-ethyl modified nucleotide with phosphorothioate linkage
  modified_base 5: mod_base = OTHER; note = 2'-O-methoxy-ethyl modified thymine with phosphorothioate linkage
  modified_base 6: mod_base = OTHER; note = 2'-O-methoxy-ethyl modified thymine with phosphorothioate linkage
  modified_base 7: mod_base = OTHER; note = 2'-O-methoxy-ethyl modified thymine with phosphorothioate linkage
  modified_base 8: mod_base = OTHER; note = 2'-O-methoxy-ethyl modified thymine with phosphorothioate linkage
  modified_base 9: mod_base = OTHER; note = 2'-O-methoxy-ethyl modified nucleotide with phosphorothioate linkage
  modified_base 10: mod_base = OTHER; note = 2'-O-methoxy-ethyl modified nucleotide with phosphorothioate linkage
  modified_base 11: mod_base = OTHER; note = 2'-O-methoxy-ethyl modified thymine with phosphorothioate linkage
  modified_base 12: mod_base = OTHER; note = 2'-O-methoxy-ethyl modified thymine with phosphorothioate linkage
  modified_base 13: mod_base = OTHER; note = 2'-O-methoxy-ethyl modified thymine with phosphorothioate linkage
  modified_base 14: mod_base = OTHER; note = 2'-O-methoxy-ethyl modified nucleotide with phosphorothioate linkage
  modified_base 15: mod_base = OTHER; note = 2'-O-methoxy-ethyl modified nucleotide with phosphorothioate linkage
  modified_base 16: mod_base = OTHER; note = 2'-O-methoxy-ethyl modified nucleotide with phosphorothioate linkage
  modified_base 17: mod_base = OTHER; note = 2'-O-methoxy-ethyl modified thymine with phosphorothioate linkage
  modified_base 18: mod_base = OTHER; note = 2'-O-methoxy-ethyl modified nucleotide with phosphorothioate linkage
  modified_base 19: mod_base = OTHER; note = Locked nucleotide with phosphorothioate linkage
  modified_base 20: mod_base = OTHER; note = 2'-O-methoxy-ethyl modified nucleotide
taaattttagtttggctgaa

SEQ ID NO: 446 - RNA, 20 nt, synthetic construct
  source 1..20: mol_type = other RNA
  modified_base 1: mod_base = OTHER; note = 2'-O-methoxy-ethyl modified thymine with phosphorothioate linkage
  modified_base 2: mod_base = OTHER; note = 2'-O-methoxy-ethyl modified nucleotide with phosphorothioate linkage
  modified_base 3: mod_base = OTHER; note = Locked nucleotide with phosphorothioate linkage
  modified_base 4: mod_base = OTHER; note = 2'-O-methoxy-ethyl modified nucleotide with phosphorothioate linkage
  modified_base 5: mod_base = OTHER; note = 2'-O-methoxy-ethyl modified thymine with phosphorothioate linkage
  modified_base 6: mod_base = OTHER; note = 2'-O-methoxy-ethyl modified thymine with phosphorothioate linkage
  modified_base 7: mod_base = OTHER; note = 2'-O-methoxy-ethyl modified thymine with phosphorothioate linkage
  modified_base 8: mod_base = OTHER; note = 2'-O-methoxy-ethyl modified thymine with phosphorothioate linkage
  modified_base 9: mod_base = OTHER; note = 2'-O-methoxy-ethyl modified nucleotide with phosphorothioate linkage
  modified_base 10: mod_base = OTHER; note = 2'-O-methoxy-ethyl modified nucleotide with phosphorothioate linkage
  modified_base 11: mod_base = OTHER; note = 2'-O-methoxy-ethyl modified thymine with phosphorothioate linkage
  modified_base 12: mod_base = OTHER; note = 2'-O-methoxy-ethyl modified thymine with phosphorothioate linkage
  modified_base 13: mod_base = OTHER; note = 2'-O-methoxy-ethyl modified thymine with phosphorothioate linkage
  modified_base 14: mod_base = OTHER; note = 2'-O-methoxy-ethyl modified nucleotide with phosphorothioate linkage
  modified_base 15: mod_base = OTHER; note = 2'-O-methoxy-ethyl modified nucleotide with phosphorothioate linkage
  modified_base 16: mod_base = OTHER; note = 2'-O-methoxy-ethyl modified nucleotide with phosphorothioate linkage
  modified_base 17: mod_base = OTHER; note = 2'-O-methoxy-ethyl modified thymine with phosphorothioate linkage
  modified_base 18: mod_base = OTHER; note = Locked nucleotide with phosphorothioate linkage
  modified_base 19: mod_base = OTHER; note = 2'-O-methoxy-ethyl modified nucleotide with phosphorothioate linkage
  modified_base 20: mod_base = OTHER; note = 2'-O-methoxy-ethyl modified nucleotide
taaattttagtttggctgaa

SEQ ID NO: 447 - RNA, 20 nt, synthetic construct
  source 1..20: mol_type = other RNA
  modified_base 1: mod_base = OTHER; note = 2'-O-methoxy-ethyl modified thymine with phosphorothioate linkage
  modified_base 2: mod_base = OTHER; note = 2'-O-methoxy-ethyl modified nucleotide with phosphorothioate linkage
  modified_base 3: mod_base = OTHER; note = 2'-O-methoxy-ethyl modified nucleotide with phosphorothioate linkage
  modified_base 4: mod_base = OTHER; note = Locked nucleotide with phosphorothioate linkage
  modified_base 5: mod_base = OTHER; note = 2'-O-methoxy-ethyl modified thymine with phosphorothioate linkage
  modified_base 6: mod_base = OTHER; note = 2'-O-methoxy-ethyl modified thymine with phosphorothioate linkage
  modified_base 7: mod_base = OTHER; note = 2'-O-methoxy-ethyl modified thymine with phosphorothioate linkage
  modified_base 8: mod_base = OTHER; note = 2'-O-methoxy-ethyl modified thymine with phosphorothioate linkage
  modified_base 9: mod_base = OTHER; note = 2'-O-methoxy-ethyl modified nucleotide with phosphorothioate linkage
  modified_base 10: mod_base = OTHER; note = 2'-O-methoxy-ethyl modified nucleotide with phosphorothioate linkage
  modified_base 11: mod_base = OTHER; note = 2'-O-methoxy-ethyl modified thymine with phosphorothioate linkage
  modified_base 12: mod_base = OTHER; note = 2'-O-methoxy-ethyl modified thymine with phosphorothioate linkage
  modified_base 13: mod_base = OTHER; note = 2'-O-methoxy-ethyl modified thymine with phosphorothioate linkage
  modified_base 14: mod_base = OTHER; note = 2'-O-methoxy-ethyl modified nucleotide with phosphorothioate linkage
  modified_base 15: mod_base = OTHER; note = 2'-O-methoxy-ethyl modified nucleotide with phosphorothioate linkage
  modified_base 16: mod_base = OTHER; note = 2'-O-methoxy-ethyl modified nucleotide with phosphorothioate linkage
  modified_base 17: mod_base = OTHER; note = Locked thymine with phosphorothioate linkage
  modified_base 18: mod_base = OTHER; note = 2'-O-methoxy-ethyl modified nucleotide with phosphorothioate linkage
  modified_base 19: mod_base = OTHER; note = 2'-O-methoxy-ethyl modified nucleotide with phosphorothioate linkage
  modified_base 20: mod_base = OTHER; note = 2'-O-methoxy-ethyl modified nucleotide
taaattttagtttggctgaa

SEQ ID NO: 448 - RNA, 20 nt, synthetic construct
  source 1..20: mol_type = other RNA
  modified_base 1: mod_base = OTHER; note = 2'-O-methoxy-ethyl modified thymine with phosphorothioate linkage
  modified_base 2: mod_base = OTHER; note = 2'-O-methoxy-ethyl modified nucleotide with phosphorothioate linkage
  modified_base 3: mod_base = OTHER; note = 2'-O-methoxy-ethyl modified nucleotide with phosphorothioate linkage
  modified_base 4: mod_base = OTHER; note = 2'-O-methoxy-ethyl modified nucleotide with phosphorothioate linkage
  modified_base 5: mod_base = OTHER; note = Locked thymine with phosphorothioate linkage
  modified_base 6: mod_base = OTHER; note = 2'-O-methoxy-ethyl modified thymine with phosphorothioate linkage
  modified_base 7: mod_base = OTHER; note = 2'-O-methoxy-ethyl modified thymine with phosphorothioate linkage
  modified_base 8: mod_base = OTHER; note = 2'-O-methoxy-ethyl modified thymine with phosphorothioate linkage
  modified_base 9: mod_base = OTHER; note = 2'-O-methoxy-ethyl modified nucleotide with phosphorothioate linkage
  modified_base 10: mod_base = OTHER; note = 2'-O-methoxy-ethyl modified nucleotide with phosphorothioate linkage
  modified_base 11: mod_base = OTHER; note = 2'-O-methoxy-ethyl modified thymine with phosphorothioate linkage
  modified_base 12: mod_base = OTHER; note = 2'-O-methoxy-ethyl modified thymine with phosphorothioate linkage
  modified_base 13: mod_base = OTHER; note = 2'-O-methoxy-ethyl modified thymine with phosphorothioate linkage
  modified_base 14: mod_base = OTHER; note = 2'-O-methoxy-ethyl modified nucleotide with phosphorothioate linkage
  modified_base 15: mod_base = OTHER; note = 2'-O-methoxy-ethyl modified nucleotide with phosphorothioate linkage
  modified_base 16: mod_base = OTHER; note = Locked nucleotide with phosphorothioate linkage
  modified_base 17: mod_base = OTHER; note = 2'-O-methoxy-ethyl modified thymine with phosphorothioate linkage
  modified_base 18: mod_base = OTHER; note = 2'-O-methoxy-ethyl modified nucleotide with phosphorothioate linkage
  modified_base 19: mod_base = OTHER; note = 2'-O-methoxy-ethyl modified nucleotide with phosphorothioate linkage
  modified_base 20: mod_base = OTHER; note = 2'-O-methoxy-ethyl modified nucleotide
taaattttagtttggctgaa

SEQ ID NO: 449 - RNA, 20 nt, synthetic construct
  source 1..20: mol_type = other RNA
  modified_base 1: mod_base = OTHER; note = 2'-O-methoxy-ethyl modified thymine with phosphorothioate linkage
  modified_base 2: mod_base = OTHER; note = 2'-O-methoxy-ethyl modified nucleotide with phosphorothioate linkage
  modified_base 3: mod_base = OTHER; note = 2'-O-methoxy-ethyl modified nucleotide with phosphorothioate linkage
  modified_base 4: mod_base = OTHER; note = 2'-O-methoxy-ethyl modified nucleotide with phosphorothioate linkage
  modified_base 5: mod_base = OTHER; note = 2'-O-methoxy-ethyl modified thymine with phosphorothioate linkage
  modified_base 6: mod_base = OTHER; note = Locked thymine with phosphorothioate linkage
  modified_base 7: mod_base = OTHER; note = 2'-O-methoxy-ethyl modified thymine with phosphorothioate linkage
  modified_base 8: mod_base = OTHER; note = 2'-O-methoxy-ethyl modified thymine with phosphorothioate linkage
  modified_base 9: mod_base = OTHER; note = 2'-O-methoxy-ethyl modified nucleotide with phosphorothioate linkage
  modified_base 10: mod_base = OTHER; note = 2'-O-methoxy-ethyl modified nucleotide with phosphorothioate linkage
  modified_base 11: mod_base = OTHER; note = 2'-O-methoxy-ethyl modified thymine with phosphorothioate linkage
  modified_base 12: mod_base = OTHER; note = 2'-O-methoxy-ethyl modified thymine with phosphorothioate linkage
  modified_base 13: mod_base = OTHER; note = 2'-O-methoxy-ethyl modified thymine with phosphorothioate linkage
  modified_base 14: mod_base = OTHER; note = 2'-O-methoxy-ethyl modified nucleotide with phosphorothioate linkage
  modified_base 15: mod_base = OTHER; note = Locked nucleotide with phosphorothioate linkage
  modified_base 16: mod_base = OTHER; note = 2'-O-methoxy-ethyl modified nucleotide with phosphorothioate linkage
  modified_base 17: mod_base = OTHER; note = 2'-O-methoxy-ethyl modified thymine with phosphorothioate linkage
  modified_base 18: mod_base = OTHER; note = 2'-O-methoxy-ethyl modified nucleotide with phosphorothioate linkage
  modified_base 19: mod_base = OTHER; note = 2'-O-methoxy-ethyl modified nucleotide with phosphorothioate linkage
  modified_base 20: mod_base = OTHER; note = 2'-O-methoxy-ethyl modified nucleotide
taaattttagtttggctgaa

SEQ ID NO: 450 - RNA, 20 nt, synthetic construct
  source 1..20: mol_type = other RNA
  modified_base 1: mod_base = OTHER; note = 2'-O-methoxy-ethyl modified thymine with phosphorothioate linkage
  modified_base 2: mod_base = OTHER; note = 2'-O-methoxy-ethyl modified nucleotide with phosphorothioate linkage
  modified_base 3: mod_base = OTHER; note = 2'-O-methoxy-ethyl modified nucleotide with phosphorothioate linkage
  modified_base 4: mod_base = OTHER; note = 2'-O-methoxy-ethyl modified nucleotide with phosphorothioate linkage
  modified_base 5: mod_base = OTHER; note = 2'-O-methoxy-ethyl modified thymine with phosphorothioate linkage
  modified_base 6: mod_base = OTHER; note = 2'-O-methoxy-ethyl modified thymine with phosphorothioate linkage
  modified_base 7: mod_base = OTHER; note = Locked thymine with phosphorothioate linkage
  modified_base 8: mod_base = OTHER; note = 2'-O-methoxy-ethyl modified thymine with phosphorothioate linkage
  modified_base 9: mod_base = OTHER; note = 2'-O-methoxy-ethyl modified nucleotide with phosphorothioate linkage
  modified_base 10: mod_base = OTHER; note = 2'-O-methoxy-ethyl modified nucleotide with phosphorothioate linkage
  modified_base 11: mod_base = OTHER; note = 2'-O-methoxy-ethyl modified thymine with phosphorothioate linkage
  modified_base 12: mod_base = OTHER; note = 2'-O-methoxy-ethyl modified thymine with phosphorothioate linkage
  modified_base 13: mod_base = OTHER; note = 2'-O-methoxy-ethyl modified thymine with phosphorothioate linkage
  modified_base 14: mod_base = OTHER; note = Locked nucleotide with phosphorothioate linkage
  modified_base 15: mod_base = OTHER; note = 2'-O-methoxy-ethyl modified nucleotide with phosphorothioate linkage
  modified_base 16: mod_base = OTHER; note = 2'-O-methoxy-ethyl modified nucleotide with phosphorothioate linkage
  modified_base 17: mod_base = OTHER; note = 2'-O-methoxy-ethyl modified thymine with phosphorothioate linkage
  modified_base 18: mod_base = OTHER; note = 2'-O-methoxy-ethyl modified nucleotide with phosphorothioate linkage
  modified_base 19: mod_base = OTHER; note = 2'-O-methoxy-ethyl modified nucleotide with phosphorothioate linkage
  modified_base 20: mod_base = OTHER; note = 2'-O-methoxy-ethyl modified nucleotide
taaattttagtttggctgaa

SEQ ID NO: 451 - RNA, 20 nt, synthetic construct
  source 1..20: mol_type = other RNA
  modified_base 1: mod_base = OTHER; note = 2'-O-methoxy-ethyl modified thymine with phosphorothioate linkage
  modified_base 2: mod_base = OTHER; note = 2'-O-methoxy-ethyl modified nucleotide with phosphorothioate linkage
  modified_base 3: mod_base = OTHER; note = 2'-O-methoxy-ethyl modified nucleotide with phosphorothioate linkage
  modified_base 4: mod_base = OTHER; note = 2'-O-methoxy-ethyl modified nucleotide with phosphorothioate linkage
  modified_base 5: mod_base = OTHER; note = 2'-O-methoxy-ethyl modified thymine with phosphorothioate linkage
  modified_base 6: mod_base = OTHER; note = 2'-O-methoxy-ethyl modified thymine with phosphorothioate linkage
  modified_base 7: mod_base = OTHER; note = 2'-O-methoxy-ethyl modified thymine with phosphorothioate linkage
  modified_base 8: mod_base = OTHER; note = Locked thymine with phosphorothioate linkage
  modified_base 9: mod_base = OTHER; note = 2'-O-methoxy-ethyl modified nucleotide with phosphorothioate linkage
  modified_base 10: mod_base = OTHER; note = 2'-O-methoxy-ethyl modified nucleotide with phosphorothioate linkage
  modified_base 11: mod_base = OTHER; note = 2'-O-methoxy-ethyl modified thymine with phosphorothioate linkage
  modified_base 12: mod_base = OTHER; note = 2'-O-methoxy-ethyl modified thymine with phosphorothioate linkage
  modified_base 13: mod_base = OTHER; note = Locked thymine with phosphorothioate linkage
  modified_base 14: mod_base = OTHER; note = 2'-O-methoxy-ethyl modified nucleotide with phosphorothioate linkage
  modified_base 15: mod_base = OTHER; note = 2'-O-methoxy-ethyl modified nucleotide with phosphorothioate linkage
  modified_base 16: mod_base = OTHER; note = 2'-O-methoxy-ethyl modified nucleotide with phosphorothioate linkage
  modified_base 17: mod_base = OTHER; note = 2'-O-methoxy-ethyl modified thymine with phosphorothioate linkage
  modified_base 18: mod_base = OTHER; note = 2'-O-methoxy-ethyl modified nucleotide with phosphorothioate linkage
  modified_base 19: mod_base = OTHER; note = 2'-O-methoxy-ethyl modified nucleotide with phosphorothioate linkage
  modified_base 20: mod_base = OTHER; note = 2'-O-methoxy-ethyl modified nucleotide
taaattttagtttggctgaa

SEQ ID NO: 452 - RNA, 20 nt, synthetic construct
  source 1..20: mol_type = other RNA
  modified_base 1: mod_base = OTHER; note = 2'-O-methoxy-ethyl modified thymine with phosphorothioate linkage
  modified_base 2: mod_base = OTHER; note = 2'-O-methoxy-ethyl modified nucleotide with phosphorothioate linkage
  modified_base 3: mod_base = OTHER; note = 2'-O-methoxy-ethyl modified nucleotide with phosphorothioate linkage
  modified_base 4: mod_base = OTHER; note = 2'-O-methoxy-ethyl modified nucleotide with phosphorothioate linkage
  modified_base 5: mod_base = OTHER; note = 2'-O-methoxy-ethyl modified thymine with phosphorothioate linkage
  modified_base 6: mod_base = OTHER; note = 2'-O-methoxy-ethyl modified thymine with phosphorothioate linkage
  modified_base 7: mod_base = OTHER; note = 2'-O-methoxy-ethyl modified thymine with phosphorothioate linkage
  modified_base 8: mod_base = OTHER; note = 2'-O-methoxy-ethyl modified thymine with phosphorothioate linkage
  modified_base 9: mod_base = OTHER; note = Locked nucleotide with phosphorothioate linkage
  modified_base 10: mod_base = OTHER; note = 2'-O-methoxy-ethyl modified nucleotide with phosphorothioate linkage
  modified_base 11: mod_base = OTHER; note = 2'-O-methoxy-ethyl modified thymine with phosphorothioate linkage
  modified_base 12: mod_base = OTHER; note = Locked thymine with phosphorothioate linkage
  modified_base 13: mod_base = OTHER; note = 2'-O-methoxy-ethyl modified thymine with phosphorothioate linkage
  modified_base 14: mod_base = OTHER; note = 2'-O-methoxy-ethyl modified nucleotide with phosphorothioate linkage
  modified_base 15: mod_base = OTHER; note = 2'-O-methoxy-ethyl modified nucleotide with phosphorothioate linkage
  modified_base 16: mod_base = OTHER; note = 2'-O-methoxy-ethyl modified nucleotide with phosphorothioate linkage
  modified_base 17: mod_base = OTHER; note = 2'-O-methoxy-ethyl modified thymine with phosphorothioate linkage
  modified_base 18: mod_base = OTHER; note = 2'-O-methoxy-ethyl modified nucleotide with phosphorothioate linkage
  modified_base 19: mod_base = OTHER; note = 2'-O-methoxy-ethyl modified nucleotide with phosphorothioate linkage
  modified_base 20: mod_base = OTHER; note = 2'-O-methoxy-ethyl modified nucleotide
taaattttagtttggctgaa

SEQ ID NO: 453 - RNA, 20 nt, synthetic construct
  source 1..20: mol_type = other RNA
  modified_base 1: mod_base = OTHER; note = 2'-O-methoxy-ethyl modified thymine with phosphorothioate linkage
  modified_base 2: mod_base = OTHER; note = 2'-O-methoxy-ethyl modified nucleotide with phosphorothioate linkage
  modified_base 3: mod_base = OTHER; note = 2'-O-methoxy-ethyl modified nucleotide with phosphorothioate linkage
  modified_base 4: mod_base = OTHER; note = 2'-O-methoxy-ethyl modified nucleotide with phosphorothioate linkage
  modified_base 5: mod_base = OTHER; note = 2'-O-methoxy-ethyl modified thymine with phosphorothioate linkage
  modified_base 6: mod_base = OTHER; note = 2'-O-methoxy-ethyl modified thymine with phosphorothioate linkage
  modified_base 7: mod_base = OTHER; note = 2'-O-methoxy-ethyl modified thymine with phosphorothioate linkage
  modified_base 8: mod_base = OTHER; note = 2'-O-methoxy-ethyl modified thymine with phosphorothioate linkage
  modified_base 9: mod_base = OTHER; note = 2'-O-methoxy-ethyl modified nucleotide with phosphorothioate linkage
  modified_base 10: mod_base = OTHER; note = Locked nucleotide with phosphorothioate linkage
  modified_base 11: mod_base = OTHER; note = Locked thymine with phosphorothioate linkage
  modified_base 12: mod_base = OTHER; note = 2'-O-methoxy-ethyl modified thymine with phosphorothioate linkage
  modified_base 13: mod_base = OTHER; note = 2'-O-methoxy-ethyl modified thymine with phosphorothioate linkage
  modified_base 14: mod_base = OTHER; note = 2'-O-methoxy-ethyl modified nucleotide with phosphorothioate linkage
  modified_base 15: mod_base = OTHER; note = 2'-O-methoxy-ethyl modified nucleotide with phosphorothioate linkage
  modified_base 16: mod_base = OTHER; note = 2'-O-methoxy-ethyl modified nucleotide with phosphorothioate linkage
  modified_base 17: mod_base = OTHER; note = 2'-O-methoxy-ethyl modified thymine with phosphorothioate linkage
  modified_base 18: mod_base = OTHER; note = 2'-O-methoxy-ethyl modified nucleotide with phosphorothioate linkage
  modified_base 19: mod_base = OTHER; note = 2'-O-methoxy-ethyl modified nucleotide with phosphorothioate linkage
  modified_base 20: mod_base = OTHER; note = 2'-O-methoxy-ethyl modified nucleotide
taaattttagtttggctgaa

SEQ ID NO: 454 - RNA, 20 nt, synthetic construct
  source 1..20: mol_type = other RNA
  modified_base 1: mod_base = OTHER; note = 2'-O-methoxy-ethyl modified thymine with phosphorothioate linkage
  modified_base 2: mod_base = OTHER; note = 2'-O-methoxy-ethyl modified nucleotide
  modified_base 3: mod_base = OTHER; note = 2'-O-methoxy-ethyl modified nucleotide with phosphorothioate linkage
  modified_base 4: mod_base = OTHER; note = 2'-O-methoxy-ethyl modified nucleotide with phosphorothioate linkage
  modified_base 5: mod_base = OTHER; note = 2'-O-methoxy-ethyl modified thymine with phosphorothioate linkage
  modified_base 6: mod_base = OTHER; note = 2'-O-methoxy-ethyl modified thymine with phosphorothioate linkage
  modified_base 7: mod_base = OTHER; note = 2'-O-methoxy-ethyl modified thymine with phosphorothioate linkage
  modified_base 8: mod_base = OTHER; note = 2'-O-methoxy-ethyl modified thymine with phosphorothioate linkage
  modified_base 9: mod_base = OTHER; note = 2'-O-methoxy-ethyl modified nucleotide with phosphorothioate linkage
  modified_base 10: mod_base = OTHER; note = 2'-O-methoxy-ethyl modified nucleotide with phosphorothioate linkage
  modified_base 11: mod_base = OTHER; note = 2'-O-methoxy-ethyl modified thymine with phosphorothioate linkage
  modified_base 12: mod_base = OTHER; note = 2'-O-methoxy-ethyl modified thymine with phosphorothioate linkage
  modified_base 13: mod_base = OTHER; note = 2'-O-methoxy-ethyl modified thymine with phosphorothioate linkage
  modified_base 14: mod_base = OTHER; note = 2'-O-methoxy-ethyl modified nucleotide with phosphorothioate linkage
  modified_base 15: mod_base = OTHER; note = 2'-O-methoxy-ethyl modified nucleotide with phosphorothioate linkage
  modified_base 16: mod_base = OTHER; note = 2'-O-methoxy-ethyl modified nucleotide with phosphorothioate linkage
  modified_base 17: mod_base = OTHER; note = 2'-O-methoxy-ethyl modified thymine with phosphorothioate linkage
  modified_base 18: mod_base = OTHER; note = 2'-O-methoxy-ethyl modified nucleotide with phosphorothioate linkage
  modified_base 19: mod_base = OTHER; note = 2'-O-methoxy-ethyl modified nucleotide with phosphorothioate linkage
  modified_base 20: mod_base = OTHER; note = 2'-O-methoxy-ethyl modified nucleotide
taaattttagtttggctgaa

SEQ ID NO: 455 - RNA, 20 nt, synthetic construct
  source 1..20: mol_type = other RNA
  modified_base 1: mod_base = OTHER; note = 2'-O-methoxy-ethyl modified thymine with phosphorothioate linkage
  modified_base 2: mod_base = OTHER; note = 2'-O-methoxy-ethyl modified nucleotide with phosphorothioate linkage
  modified_base 3: mod_base = OTHER; note = 2'-O-methoxy-ethyl modified nucleotide
  modified_base 4: mod_base = OTHER; note = 2'-O-methoxy-ethyl modified nucleotide with phosphorothioate linkage
  modified_base 5: mod_base = OTHER; note = 2'-O-methoxy-ethyl modified thymine with phosphorothioate linkage
  modified_base 6: mod_base = OTHER; note = 2'-O-methoxy-ethyl modified thymine with phosphorothioate linkage
  modified_base 7: mod_base = OTHER; note = 2'-O-methoxy-ethyl modified thymine with phosphorothioate linkage
  modified_base 8: mod_base = OTHER; note = 2'-O-methoxy-ethyl modified thymine with phosphorothioate linkage
  modified_base 9: mod_base = OTHER; note = 2'-O-methoxy-ethyl modified nucleotide with phosphorothioate linkage
  modified_base 10: mod_base = OTHER; note = 2'-O-methoxy-ethyl modified nucleotide with phosphorothioate linkage
  modified_base 11: mod_base = OTHER; note = 2'-O-methoxy-ethyl modified thymine with phosphorothioate linkage
  modified_base 12: mod_base = OTHER; note = 2'-O-methoxy-ethyl modified thymine with phosphorothioate linkage
  modified_base 13: mod_base = OTHER; note = 2'-O-methoxy-ethyl modified thymine with phosphorothioate linkage
  modified_base 14: mod_base = OTHER; note = 2'-O-methoxy-ethyl modified nucleotide with phosphorothioate linkage
  modified_base 15: mod_base = OTHER; note = 2'-O-methoxy-ethyl modified nucleotide with phosphorothioate linkage
  modified_base 16: mod_base = OTHER; note = 2'-O-methoxy-ethyl modified nucleotide with phosphorothioate linkage
  modified_base 17: mod_base = OTHER; note = 2'-O-methoxy-ethyl modified thymine with phosphorothioate linkage
  modified_base 18: mod_base = OTHER; note = 2'-O-methoxy-ethyl modified nucleotide with phosphorothioate linkage
  modified_base 19: mod_base = OTHER; note = 2'-O-methoxy-ethyl modified nucleotide with phosphorothioate linkage
  modified_base 20: mod_base = OTHER; note = 2'-O-methoxy-ethyl modified nucleotide
taaattttagtttggctgaa

SEQ ID NO: 456 - RNA, 20 nt, synthetic construct
  source 1..20: mol_type = other RNA
  modified_base 1: mod_base = OTHER; note = 2'-O-methoxy-ethyl modified thymine with phosphorothioate linkage
  modified_base 2: mod_base = OTHER; note = 2'-O-methoxy-ethyl modified nucleotide with phosphorothioate linkage
  modified_base 3: mod_base = OTHER; note = 2'-O-methoxy-ethyl modified nucleotide with phosphorothioate linkage
  modified_base 4: mod_base = OTHER; note = 2'-O-methoxy-ethyl modified nucleotide
  modified_base 5: mod_base = OTHER; note = 2'-O-methoxy-ethyl modified thymine with phosphorothioate linkage
  modified_base 6: mod_base = OTHER; note = 2'-O-methoxy-ethyl modified thymine with phosphorothioate linkage
  modified_base 7: mod_base = OTHER; note = 2'-O-methoxy-ethyl modified thymine with phosphorothioate linkage
  modified_base 8: mod_base = OTHER; note = 2'-O-methoxy-ethyl modified thymine with phosphorothioate linkage
  modified_base 9: mod_base = OTHER; note = 2'-O-methoxy-ethyl modified nucleotide with phosphorothioate linkage
  modified_base 10: mod_base = OTHER; note = 2'-O-methoxy-ethyl modified nucleotide with phosphorothioate linkage
  modified_base 11: mod_base = OTHER; note = 2'-O-methoxy-ethyl modified thymine with phosphorothioate linkage
  modified_base 12: mod_base = OTHER; note = 2'-O-methoxy-ethyl modified thymine with phosphorothioate linkage
  modified_base 13: mod_base = OTHER; note = 2'-O-methoxy-ethyl modified thymine with phosphorothioate linkage
  modified_base 14: mod_base = OTHER; note = 2'-O-methoxy-ethyl modified nucleotide with phosphorothioate linkage
  modified_base 15: mod_base = OTHER; note = 2'-O-methoxy-ethyl modified nucleotide with phosphorothioate linkage
  modified_base 16: mod_base = OTHER; note = 2'-O-methoxy-ethyl modified nucleotide with phosphorothioate linkage
  modified_base 17: mod_base = OTHER; note = 2'-O-methoxy-ethyl modified thymine with phosphorothioate linkage
  modified_base 18: mod_base = OTHER; note = 2'-O-methoxy-ethyl modified nucleotide with phosphorothioate linkage
  modified_base 19: mod_base = OTHER; note = 2'-O-methoxy-ethyl modified nucleotide with phosphorothioate linkage
  modified_base 20: mod_base = OTHER; note = 2'-O-methoxy-ethyl modified nucleotide
taaattttagtttggctgaa

SEQ ID NO: 457 - RNA, 20 nt, synthetic construct
  source 1..20: mol_type = other RNA
  modified_base 1: mod_base = OTHER; note = 2'-O-methoxy-ethyl modified thymine with phosphorothioate linkage
  modified_base 2: mod_base = OTHER; note = 2'-O-methoxy-ethyl modified nucleotide with phosphorothioate linkage
  modified_base 3: mod_base = OTHER; note = 2'-O-methoxy-ethyl modified nucleotide with phosphorothioate linkage
  modified_base 4: mod_base = OTHER; note = 2'-O-methoxy-ethyl modified nucleotide with phosphorothioate linkage
  modified_base 5: mod_base = OTHER; note = 2'-O-methoxy-ethyl modified thymine
  modified_base 6: mod_base = OTHER; note = 2'-O-methoxy-ethyl modified thymine with phosphorothioate linkage
  modified_base 7: mod_base = OTHER; note = 2'-O-methoxy-ethyl modified thymine with phosphorothioate linkage
  modified_base 8: mod_base = OTHER; note = 2'-O-methoxy-ethyl modified thymine with phosphorothioate linkage
  modified_base 9: mod_base = OTHER; note = 2'-O-methoxy-ethyl modified nucleotide with phosphorothioate linkage
  modified_base 10: mod_base = OTHER; note = 2'-O-methoxy-ethyl modified nucleotide with phosphorothioate linkage
  modified_base 11: mod_base = OTHER; note = 2'-O-methoxy-ethyl modified thymine with phosphorothioate linkage
  modified_base 12: mod_base = OTHER; note = 2'-O-methoxy-ethyl modified thymine with phosphorothioate linkage
  modified_base 13: mod_base = OTHER; note = 2'-O-methoxy-ethyl modified thymine with phosphorothioate linkage
  modified_base 14: mod_base = OTHER; note = 2'-O-methoxy-ethyl modified nucleotide with phosphorothioate linkage
  modified_base 15: mod_base = OTHER; note = 2'-O-methoxy-ethyl modified nucleotide with phosphorothioate linkage
  modified_base 16: mod_base = OTHER; note = 2'-O-methoxy-ethyl modified nucleotide with phosphorothioate linkage
  modified_base 17: mod_base = OTHER; note = 2'-O-methoxy-ethyl modified thymine with phosphorothioate linkage
  modified_base 18: mod_base = OTHER; note = 2'-O-methoxy-ethyl modified nucleotide with phosphorothioate linkage
  modified_base 19: mod_base = OTHER; note = 2'-O-methoxy-ethyl modified nucleotide with phosphorothioate linkage
  modified_base 20: mod_base = OTHER; note = 2'-O-methoxy-ethyl modified nucleotide
taaattttagtttggctgaa

SEQ ID NO: 458 - RNA, 20 nt, synthetic construct
  source 1..20: mol_type = other RNA
  modified_base 1: mod_base = OTHER; note = 2'-O-methoxy-ethyl modified thymine with phosphorothioate linkage
  modified_base 2: mod_base = OTHER; note = 2'-O-methoxy-ethyl modified nucleotide with phosphorothioate linkage
  modified_base 3: mod_base = OTHER; note = 2'-O-methoxy-ethyl modified nucleotide with phosphorothioate linkage
  modified_base 4: mod_base = OTHER; note = 2'-O-methoxy-ethyl modified nucleotide with phosphorothioate linkage
  modified_base 5: mod_base = OTHER; note = 2'-O-methoxy-ethyl modified thymine with phosphorothioate linkage
  modified_base 6: mod_base = OTHER; note = 2'-O-methoxy-ethyl modified thymine
  modified_base 7: mod_base = OTHER; note = 2'-O-methoxy-ethyl modified thymine with phosphorothioate linkage
  modified_base 8: mod_base = OTHER; note = 2'-O-methoxy-ethyl modified thymine with phosphorothioate linkage
  modified_base 9: mod_base = OTHER; note = 2'-O-methoxy-ethyl modified nucleotide with phosphorothioate linkage
  modified_base 10: mod_base = OTHER; note = 2'-O-methoxy-ethyl modified nucleotide with phosphorothioate linkage
  modified_base 11: mod_base = OTHER; note = 2'-O-methoxy-ethyl modified thymine with phosphorothioate linkage
  modified_base 12: mod_base = OTHER; note = 2'-O-methoxy-ethyl modified thymine with phosphorothioate linkage
  modified_base 13: mod_base = OTHER; note = 2'-O-methoxy-ethyl modified thymine with phosphorothioate linkage
  modified_base 14: mod_base = OTHER; note = 2'-O-methoxy-ethyl modified nucleotide with phosphorothioate linkage
  modified_base 15: mod_base = OTHER; note = 2'-O-methoxy-ethyl modified nucleotide with phosphorothioate linkage
  modified_base 16: mod_base = OTHER; note = 2'-O-methoxy-ethyl modified nucleotide with phosphorothioate linkage
  modified_base 17: mod_base = OTHER; note = 2'-O-methoxy-ethyl modified thymine with phosphorothioate linkage
  modified_base 18: mod_base = OTHER; note = 2'-O-methoxy-ethyl modified nucleotide with phosphorothioate linkage
  modified_base 19: mod_base = OTHER; note = 2'-O-methoxy-ethyl modified nucleotide with phosphorothioate linkage
  modified_base 20: mod_base = OTHER; note = 2'-O-methoxy-ethyl modified nucleotide
taaattttagtttggctgaa

SEQ ID NO: 459 - RNA, 20 nt, synthetic construct
  source 1..20: mol_type = other RNA
  modified_base 1: mod_base = OTHER; note = 2'-O-methoxy-ethyl modified thymine with phosphorothioate linkage
  modified_base 2: mod_base = OTHER; note = 2'-O-methoxy-ethyl modified nucleotide with phosphorothioate linkage
  modified_base 3: mod_base = OTHER; note = 2'-O-methoxy-ethyl modified nucleotide with phosphorothioate linkage
  modified_base 4: mod_base = OTHER; note = 2'-O-methoxy-ethyl modified nucleotide with phosphorothioate linkage
  modified_base 5: mod_base = OTHER; note = 2'-O-methoxy-ethyl modified thymine with phosphorothioate linkage
  modified_base 6: mod_base = OTHER; note = 2'-O-methoxy-ethyl modified thymine with phosphorothioate linkage
  modified_base 7: mod_base = OTHER; note = 2'-O-methoxy-ethyl modified thymine
  modified_base 8: mod_base = OTHER; note = 2'-O-methoxy-ethyl modified thymine with phosphorothioate linkage
  modified_base 9: mod_base = OTHER; note = 2'-O-methoxy-ethyl modified nucleotide with phosphorothioate linkage
  modified_base 10: mod_base = OTHER; note = 2'-O-methoxy-ethyl modified nucleotide with phosphorothioate linkage
  modified_base 11: mod_base = OTHER; note = 2'-O-methoxy-ethyl modified thymine with phosphorothioate linkage
  modified_base 12: mod_base = OTHER; note = 2'-O-methoxy-ethyl modified thymine with phosphorothioate linkage
  modified_base 13: mod_base = OTHER; note = 2'-O-methoxy-ethyl modified thymine with phosphorothioate linkage
  modified_base 14: mod_base = OTHER; note = 2'-O-methoxy-ethyl modified nucleotide with phosphorothioate linkage
  modified_base 15: mod_base = OTHER; note = 2'-O-methoxy-ethyl modified nucleotide with phosphorothioate linkage
  modified_base 16: mod_base = OTHER; note = 2'-O-methoxy-ethyl modified nucleotide with phosphorothioate linkage
  modified_base 17: mod_base = OTHER; note = 2'-O-methoxy-ethyl modified thymine with phosphorothioate linkage
  modified_base 18: mod_base = OTHER; note = 2'-O-methoxy-ethyl modified nucleotide with phosphorothioate linkage
  modified_base 19: mod_base = OTHER; note = 2'-O-methoxy-ethyl modified nucleotide with phosphorothioate linkage
  modified_base 20: mod_base = OTHER; note = 2'-O-methoxy-ethyl modified nucleotide
taaattttagtttggctgaa

SEQ ID NO: 460 - RNA, 20 nt, synthetic construct
  source 1..20: mol_type = other RNA
  modified_base 1: mod_base = OTHER; note = 2'-O-methoxy-ethyl modified thymine with phosphorothioate linkage
  modified_base 2: mod_base = OTHER; note = 2'-O-methoxy-ethyl modified nucleotide with phosphorothioate linkage
  modified_base 3: mod_base = OTHER; note = 2'-O-methoxy-ethyl modified nucleotide with phosphorothioate linkage
  modified_base 4: mod_base = OTHER; note = 2'-O-methoxy-ethyl modified nucleotide with phosphorothioate linkage
  modified_base 5: mod_base = OTHER; note = 2'-O-methoxy-ethyl modified thymine with phosphorothioate linkage
  modified_base 6: mod_base = OTHER; note = 2'-O-methoxy-ethyl modified thymine with phosphorothioate linkage
  modified_base 7: mod_base = OTHER; note = 2'-O-methoxy-ethyl modified thymine with phosphorothioate linkage
  modified_base 8: mod_base = OTHER; note = 2'-O-methoxy-ethyl modified thymine
  modified_base 9: mod_base = OTHER; note = 2'-O-methoxy-ethyl modified nucleotide with phosphorothioate linkage
  modified_base 10: mod_base = OTHER; note = 2'-O-methoxy-ethyl modified nucleotide with phosphorothioate linkage
  modified_base 11: mod_base = OTHER; note = 2'-O-methoxy-ethyl modified thymine with phosphorothioate linkage
  modified_base 12: mod_base = OTHER; note = 2'-O-methoxy-ethyl modified thymine with phosphorothioate linkage
  modified_base 13: mod_base = OTHER; note = 2'-O-methoxy-ethyl modified thymine with phosphorothioate linkage
  modified_base 14: mod_base = OTHER; note = 2'-O-methoxy-ethyl modified nucleotide with phosphorothioate linkage
  modified_base 15: mod_base = OTHER; note = 2'-O-methoxy-ethyl modified nucleotide with phosphorothioate linkage
  modified_base 16: mod_base = OTHER; note = 2'-O-methoxy-ethyl modified nucleotide with phosphorothioate linkage
  modified_base 17: mod_base = OTHER; note = 2'-O-methoxy-ethyl modified thymine with phosphorothioate linkage
  modified_base 18: mod_base = OTHER; note = 2'-O-methoxy-ethyl modified nucleotide with phosphorothioate linkage
  modified_base 19: mod_base = OTHER; note = 2'-O-methoxy-ethyl modified nucleotide with phosphorothioate linkage
  modified_base 20: mod_base = OTHER; note = 2'-O-methoxy-ethyl modified nucleotide
taaattttagtttggctgaa

SEQ ID NO: 461 - RNA, 20 nt, synthetic construct
  source 1..20: mol_type = other RNA
  modified_base 1: mod_base = OTHER; note = 2'-O-methoxy-ethyl modified thymine with phosphorothioate linkage
  modified_base 2: mod_base = OTHER; note = 2'-O-methoxy-ethyl modified nucleotide with phosphorothioate linkage
  modified_base 3: mod_base = OTHER; note = 2'-O-methoxy-ethyl modified nucleotide with phosphorothioate linkage
  modified_base 4: mod_base = OTHER; note = 2'-O-methoxy-ethyl modified nucleotide with phosphorothioate linkage
  modified_base 5: mod_base = OTHER; note = 2'-O-methoxy-ethyl modified thymine with phosphorothioate linkage
  modified_base 6: mod_base = OTHER; note = 2'-O-methoxy-ethyl modified thymine with phosphorothioate linkage
  modified_base 7: mod_base = OTHER; note = 2'-O-methoxy-ethyl modified thymine with phosphorothioate linkage
  modified_base 8: mod_base = OTHER; note = 2'-O-methoxy-ethyl modified thymine with phosphorothioate linkage
  modified_base 9: mod_base = OTHER; note = 2'-O-methoxy-ethyl modified nucleotide
  modified_base 10: mod_base = OTHER; note = 2'-O-methoxy-ethyl modified nucleotide with phosphorothioate linkage
  modified_base 11: mod_base = OTHER; note = 2'-O-methoxy-ethyl modified thymine with phosphorothioate linkage
  modified_base 12: mod_base = OTHER; note = 2'-O-methoxy-ethyl modified thymine with phosphorothioate linkage
  modified_base 13: mod_base = OTHER; note = 2'-O-methoxy-ethyl modified thymine with phosphorothioate linkage
  modified_base 14: mod_base = OTHER; note = 2'-O-methoxy-ethyl modified nucleotide with phosphorothioate linkage
  modified_base 15: mod_base = OTHER; note = 2'-O-methoxy-ethyl modified nucleotide with phosphorothioate linkage
  modified_base 16: mod_base = OTHER; note = 2'-O-methoxy-ethyl modified nucleotide with phosphorothioate linkage
  modified_base 17: mod_base = OTHER; note = 2'-O-methoxy-ethyl modified thymine with phosphorothioate linkage
  modified_base 18: mod_base = OTHER; note = 2'-O-methoxy-ethyl modified nucleotide with phosphorothioate linkage
  modified_base 19: mod_base = OTHER; note = 2'-O-methoxy-ethyl modified nucleotide with phosphorothioate linkage
  modified_base 20: mod_base = OTHER; note = 2'-O-methoxy-ethyl modified nucleotide
taaattttagtttggctgaa

SEQ ID NO: 462 - RNA, 20 nt, synthetic construct
  source 1..20: mol_type = other RNA
  modified_base 1: mod_base = OTHER; note = 2'-O-methoxy-ethyl modified thymine with phosphorothioate linkage
  modified_base 2: mod_base = OTHER; note = 2'-O-methoxy-ethyl modified nucleotide with phosphorothioate linkage
  modified_base 3: mod_base = OTHER; note = 2'-O-methoxy-ethyl modified nucleotide with phosphorothioate linkage
  modified_base 4: mod_base = OTHER; note = 2'-O-methoxy-ethyl modified nucleotide with phosphorothioate linkage
  modified_base 5: mod_base = OTHER; note = 2'-O-methoxy-ethyl modified thymine with phosphorothioate linkage
  modified_base 6: mod_base = OTHER; note = 2'-O-methoxy-ethyl modified thymine with phosphorothioate linkage
  modified_base 7: mod_base = OTHER; note = 2'-O-methoxy-ethyl modified thymine with phosphorothioate linkage
  modified_base 8: mod_base = OTHER; note = 2'-O-methoxy-ethyl modified thymine with phosphorothioate linkage
  modified_base 9: mod_base = OTHER; note = 2'-O-methoxy-ethyl modified nucleotide with phosphorothioate linkage
  modified_base 10: mod_base = OTHER; note = 2'-O-methoxy-ethyl modified nucleotide
  modified_base 11: mod_base = OTHER; note = 2'-O-methoxy-ethyl modified thymine with phosphorothioate linkage
  modified_base 12: mod_base = OTHER; note = 2'-O-methoxy-ethyl modified thymine with phosphorothioate linkage
  modified_base 13: mod_base = OTHER; note = 2'-O-methoxy-ethyl modified thymine with phosphorothioate linkage
  modified_base 14: mod_base = OTHER; note = 2'-O-methoxy-ethyl modified nucleotide with phosphorothioate linkage
  modified_base 15: mod_base = OTHER; note = 2'-O-methoxy-ethyl modified nucleotide with phosphorothioate linkage
  modified_base 16: mod_base = OTHER; note = 2'-O-methoxy-ethyl modified nucleotide with phosphorothioate linkage
  modified_base 17: mod_base = OTHER; note = 2'-O-methoxy-ethyl modified thymine with phosphorothioate linkage
  modified_base 18: mod_base = OTHER; note = 2'-O-methoxy-ethyl modified nucleotide with phosphorothioate linkage
  modified_base 19: mod_base = OTHER; note = 2'-O-methoxy-ethyl modified nucleotide with phosphorothioate linkage
  modified_base 20: mod_base = OTHER; note = 2'-O-methoxy-ethyl modified nucleotide
taaattttagtttggctgaa

SEQ ID NO: 463 - RNA, 20 nt, synthetic construct
  source 1..20: mol_type = other RNA
  modified_base 1: mod_base = OTHER; note = 2'-O-methoxy-ethyl modified thymine with phosphorothioate linkage
  modified_base 2: mod_base = OTHER; note = 2'-O-methoxy-ethyl modified nucleotide with phosphorothioate linkage
  modified_base 3: mod_base = OTHER; note = 2'-O-methoxy-ethyl modified nucleotide with phosphorothioate linkage
  modified_base 4: mod_base = OTHER; note = 2'-O-methoxy-ethyl modified nucleotide with phosphorothioate linkage
  modified_base 5: mod_base = OTHER; note = 2'-O-methoxy-ethyl modified thymine with phosphorothioate linkage
  modified_base 6: mod_base = OTHER; note = 2'-O-methoxy-ethyl modified thymine with phosphorothioate linkage
  modified_base 7: mod_base = OTHER; note = 2'-O-methoxy-ethyl modified thymine with phosphorothioate linkage
  modified_base 8: mod_base = OTHER; note = 2'-O-methoxy-ethyl modified thymine with phosphorothioate linkage
  modified_base 9: mod_base = OTHER; note = 2'-O-methoxy-ethyl modified nucleotide with phosphorothioate linkage
  modified_base 10: mod_base = OTHER; note = 2'-O-methoxy-ethyl modified nucleotide with phosphorothioate linkage
  modified_base 11: mod_base = OTHER; note = 2'-O-methoxy-ethyl modified thymine
  modified_base 12: mod_base = OTHER; note = 2'-O-methoxy-ethyl modified thymine with phosphorothioate linkage
  modified_base 13: mod_base = OTHER; note = 2'-O-methoxy-ethyl modified thymine with phosphorothioate linkage
  modified_base 14: mod_base = OTHER; note = 2'-O-methoxy-ethyl modified nucleotide with phosphorothioate linkage
  modified_base 15: mod_base = OTHER; note = 2'-O-methoxy-ethyl modified nucleotide with phosphorothioate linkage
  modified_base 16: mod_base = OTHER; note = 2'-O-methoxy-ethyl modified nucleotide with phosphorothioate linkage
  modified_base 17: mod_base = OTHER; note = 2'-O-methoxy-ethyl modified thymine with phosphorothioate linkage
  modified_base 18: mod_base = OTHER; note = 2'-O-methoxy-ethyl modified nucleotide with phosphorothioate linkage
  modified_base 19: mod_base = OTHER; note = 2'-O-methoxy-ethyl modified nucleotide with phosphorothioate linkage
  modified_base 20: mod_base = OTHER; note = 2'-O-methoxy-ethyl modified nucleotide
taaattttagtttggctgaa

SEQ ID NO: 464 - RNA, 20 nt, synthetic construct
  source 1..20: mol_type = other RNA
  modified_base 1: mod_base = OTHER; note = 2'-O-methoxy-ethyl modified thymine with phosphorothioate linkage
  modified_base 2: mod_base = OTHER; note = 2'-O-methoxy-ethyl modified nucleotide with phosphorothioate linkage
  modified_base 3: mod_base = OTHER; note = 2'-O-methoxy-ethyl modified nucleotide with phosphorothioate linkage
  modified_base 4: mod_base = OTHER; note = 2'-O-methoxy-ethyl modified nucleotide with phosphorothioate linkage
  modified_base 5: mod_base = OTHER; note = 2'-O-methoxy-ethyl modified thymine with phosphorothioate linkage
  modified_base 6: mod_base = OTHER; note = 2'-O-methoxy-ethyl modified thymine with phosphorothioate linkage
  modified_base 7: mod_base = OTHER; note = 2'-O-methoxy-ethyl modified thymine with phosphorothioate linkage
  modified_base 8: mod_base = OTHER; note = 2'-O-methoxy-ethyl modified thymine with phosphorothioate linkage
  modified_base 9: mod_base = OTHER; note = 2'-O-methoxy-ethyl modified nucleotide with phosphorothioate linkage
  modified_base 10: mod_base = OTHER; note = 2'-O-methoxy-ethyl modified nucleotide with phosphorothioate linkage
  modified_base 11: mod_base = OTHER; note = 2'-O-methoxy-ethyl modified thymine with phosphorothioate linkage
  modified_base 12: mod_base = OTHER; note = 2'-O-methoxy-ethyl modified thymine
  modified_base 13: mod_base = OTHER; note = 2'-O-methoxy-ethyl modified thymine with phosphorothioate linkage
  modified_base 14: mod_base = OTHER; note = 2'-O-methoxy-ethyl modified nucleotide with phosphorothioate linkage
  modified_base 15: mod_base = OTHER; note = 2'-O-methoxy-ethyl modified nucleotide with phosphorothioate linkage
  modified_base 16: mod_base = OTHER; note = 2'-O-methoxy-ethyl modified nucleotide with phosphorothioate linkage
  modified_base 17: mod_base = OTHER; note = 2'-O-methoxy-ethyl modified thymine with phosphorothioate linkage
  modified_base 18: mod_base = OTHER; note = 2'-O-methoxy-ethyl modified nucleotide with phosphorothioate linkage
  modified_base 19: mod_base = OTHER; note = 2'-O-methoxy-ethyl modified nucleotide with phosphorothioate linkage
  modified_base 20: mod_base = OTHER; note = 2'-O-methoxy-ethyl modified nucleotide
taaattttagtttggctgaa

SEQ ID NO: 465 - RNA, 20 nt, synthetic construct
  source 1..20: mol_type = other RNA
  modified_base 1: mod_base = OTHER; note = 2'-O-methoxy-ethyl modified thymine with phosphorothioate linkage
  modified_base 2: mod_base = OTHER; note = 2'-O-methoxy-ethyl modified nucleotide with phosphorothioate linkage
  modified_base 3: mod_base = OTHER; note = 2'-O-methoxy-ethyl modified nucleotide with phosphorothioate linkage
  modified_base 4: mod_base = OTHER; note = 2'-O-methoxy-ethyl modified nucleotide with phosphorothioate linkage
  modified_base 5: mod_base = OTHER; note = 2'-O-methoxy-ethyl modified thymine with phosphorothioate linkage
  modified_base 6: mod_base = OTHER; note = 2'-O-methoxy-ethyl modified thymine with phosphorothioate linkage
  modified_base 7: mod_base = OTHER; note = 2'-O-methoxy-ethyl modified thymine with phosphorothioate linkage
  modified_base 8: mod_base = OTHER; note = 2'-O-methoxy-ethyl modified thymine with phosphorothioate linkage
  modified_base 9: mod_base = OTHER; note = 2'-O-methoxy-ethyl modified nucleotide with phosphorothioate linkage
  modified_base 10: mod_base = OTHER; note = 2'-O-methoxy-ethyl modified nucleotide with phosphorothioate linkage
  modified_base 11: mod_base = OTHER; note = 2'-O-methoxy-ethyl modified thymine with phosphorothioate linkage
  modified_base 12: mod_base = OTHER; note = 2'-O-methoxy-ethyl modified thymine with phosphorothioate linkage
  modified_base 13: mod_base = OTHER; note = 2'-O-methoxy-ethyl modified thymine
  modified_base 14: mod_base = OTHER; note = 2'-O-methoxy-ethyl modified nucleotide with phosphorothioate linkage
  modified_base 15: mod_base = OTHER; note = 2'-O-methoxy-ethyl modified nucleotide with phosphorothioate linkage
  modified_base 16: mod_base = OTHER; note = 2'-O-methoxy-ethyl modified nucleotide with phosphorothioate linkage
  modified_base 17: mod_base = OTHER; note = 2'-O-methoxy-ethyl modified thymine with phosphorothioate linkage
  modified_base 18: mod_base = OTHER; note = 2'-O-methoxy-ethyl modified nucleotide with phosphorothioate linkage
  modified_base 19: mod_base = OTHER; note = 2'-O-methoxy-ethyl modified nucleotide with phosphorothioate linkage
  modified_base 20: mod_base = OTHER; note = 2'-O-methoxy-ethyl modified nucleotide
taaattttagtttggctgaa

SEQ ID NO: 466 - RNA, 20 nt, synthetic construct
  source 1..20: mol_type = other RNA
  modified_base 1: mod_base = OTHER; note = 2'-O-methoxy-ethyl modified thymine with phosphorothioate linkage
  modified_base 2: mod_base = OTHER; note = 2'-O-methoxy-ethyl modified nucleotide with phosphorothioate linkage
  modified_base 3: mod_base = OTHER; note = 2'-O-methoxy-ethyl modified nucleotide with phosphorothioate linkage
  modified_base 4: mod_base = OTHER; note = 2'-O-methoxy-ethyl modified nucleotide with phosphorothioate linkage
  modified_base 5: mod_base = OTHER; note = 2'-O-methoxy-ethyl modified thymine with phosphorothioate linkage
  modified_base 6: mod_base = OTHER; note = 2'-O-methoxy-ethyl modified thymine with phosphorothioate linkage
  modified_base 7: mod_base = OTHER; note = 2'-O-methoxy-ethyl modified thymine with phosphorothioate linkage
  modified_base 8: mod_base = OTHER; note = 2'-O-methoxy-ethyl modified thymine with phosphorothioate linkage
  modified_base 9: mod_base = OTHER; note = 2'-O-methoxy-ethyl modified nucleotide with phosphorothioate linkage
  modified_base 10: mod_base = OTHER; note = 2'-O-methoxy-ethyl modified nucleotide with phosphorothioate linkage
  modified_base 11: mod_base = OTHER; note = 2'-O-methoxy-ethyl modified thymine with phosphorothioate linkage
  modified_base 12: mod_base = OTHER; note = 2'-O-methoxy-ethyl modified thymine with phosphorothioate linkage
  modified_base 13: mod_base = OTHER; note = 2'-O-methoxy-ethyl modified thymine with phosphorothioate linkage
  modified_base 14: mod_base = OTHER; note = 2'-O-methoxy-ethyl modified nucleotide
  modified_base 15: mod_base = OTHER; note = 2'-O-methoxy-ethyl modified nucleotide with phosphorothioate linkage
  modified_base 16: mod_base = OTHER; note = 2'-O-methoxy-ethyl modified nucleotide with phosphorothioate linkage
  modified_base 17: mod_base = OTHER; note = 2'-O-methoxy-ethyl modified thymine with phosphorothioate linkage
  modified_base 18: mod_base = OTHER; note = 2'-O-methoxy-ethyl modified nucleotide with phosphorothioate linkage
  modified_base 19: mod_base = OTHER; note = 2'-O-methoxy-ethyl modified nucleotide with phosphorothioate linkage
  modified_base 20: mod_base = OTHER; note = 2'-O-methoxy-ethyl modified nucleotide
taaattttagtttggctgaa

SEQ ID NO: 467 - RNA, 20 nt, synthetic construct
  source 1..20: mol_type = other RNA
  modified_base 1: mod_base = OTHER; note = 2'-O-methoxy-ethyl modified thymine with phosphorothioate linkage
  modified_base 2: mod_base = OTHER; note = 2'-O-methoxy-ethyl modified nucleotide with phosphorothioate linkage
  modified_base 3: mod_base = OTHER; note = 2'-O-methoxy-ethyl modified nucleotide with phosphorothioate linkage
  modified_base 4: mod_base = OTHER; note = 2'-O-methoxy-ethyl modified nucleotide with phosphorothioate linkage
  modified_base 5: mod_base = OTHER; note = 2'-O-methoxy-ethyl modified thymine with phosphorothioate linkage
  modified_base 6: mod_base = OTHER; note = 2'-O-methoxy-ethyl modified thymine with phosphorothioate linkage
  modified_base 7: mod_base = OTHER; note = 2'-O-methoxy-ethyl modified thymine with phosphorothioate linkage
  modified_base 8: mod_base = OTHER; note = 2'-O-methoxy-ethyl modified thymine with phosphorothioate linkage
  modified_base 9: mod_base = OTHER; note = 2'-O-methoxy-ethyl modified nucleotide with phosphorothioate linkage
  modified_base 10: mod_base = OTHER; note = 2'-O-methoxy-ethyl modified nucleotide with phosphorothioate linkage
  modified_base 11: mod_base = OTHER; note = 2'-O-methoxy-ethyl modified thymine with phosphorothioate linkage
  modified_base 12: mod_base = OTHER; note = 2'-O-methoxy-ethyl modified thymine with phosphorothioate linkage
  modified_base 13: mod_base = OTHER; note = 2'-O-methoxy-ethyl modified thymine with phosphorothioate linkage
  modified_base 14: mod_base = OTHER; note = 2'-O-methoxy-ethyl modified nucleotide with phosphorothioate linkage
  modified_base 15: mod_base = OTHER; note = 2'-O-methoxy-ethyl modified nucleotide
  modified_base 16: mod_base = OTHER; note = 2'-O-methoxy-ethyl modified nucleotide with phosphorothioate linkage
  modified_base 17: mod_base = OTHER; note = 2'-O-methoxy-ethyl modified thymine with phosphorothioate linkage
  modified_base 18: mod_base = OTHER; note = 2'-O-methoxy-ethyl modified nucleotide with phosphorothioate linkage
  modified_base 19: mod_base = OTHER; note = 2'-O-methoxy-ethyl modified nucleotide with phosphorothioate linkage
  modified_base 20: mod_base = OTHER; note = 2'-O-methoxy-ethyl modified nucleotide
taaattttagtttggctgaa

SEQ ID NO: 468 - RNA, 20 nt, synthetic construct
  source 1..20: mol_type = other RNA
  modified_base 1: mod_base = OTHER; note = 2'-O-methoxy-ethyl modified thymine with phosphorothioate linkage
  modified_base 2: mod_base = OTHER; note = 2'-O-methoxy-ethyl modified nucleotide with phosphorothioate linkage
  modified_base 3: mod_base = OTHER; note = 2'-O-methoxy-ethyl modified nucleotide with phosphorothioate linkage
  modified_base 4: mod_base = OTHER; note = 2'-O-methoxy-ethyl modified nucleotide with phosphorothioate linkage
  modified_base 5: mod_base = OTHER; note = 2'-O-methoxy-ethyl modified thymine with phosphorothioate linkage
  modified_base 6: mod_base = OTHER; note = 2'-O-methoxy-ethyl modified thymine with phosphorothioate linkage
  modified_base 7: mod_base = OTHER; note = 2'-O-methoxy-ethyl modified thymine with phosphorothioate linkage
  modified_base 8: mod_base = OTHER; note = 2'-O-methoxy-ethyl modified thymine with phosphorothioate linkage
  modified_base 9: mod_base = OTHER; note = 2'-O-methoxy-ethyl modified nucleotide with phosphorothioate linkage
  modified_base 10: mod_base = OTHER; note = 2'-O-methoxy-ethyl modified nucleotide with phosphorothioate linkage
  modified_base 11: mod_base = OTHER; note = 2'-O-methoxy-ethyl modified thymine with phosphorothioate linkage
  modified_base 12: mod_base = OTHER; note = 2'-O-methoxy-ethyl modified thymine with phosphorothioate linkage
  modified_base 13: mod_base = OTHER; note = 2'-O-methoxy-ethyl modified thymine with phosphorothioate linkage
  modified_base 14: mod_base = OTHER; note = 2'-O-methoxy-ethyl modified nucleotide with phosphorothioate linkage
  modified_base 15: mod_base = OTHER; note = 2'-O-methoxy-ethyl modified nucleotide with phosphorothioate linkage
  modified_base 16: mod_base = OTHER; note = 2'-O-methoxy-ethyl modified nucleotide
  modified_base 17: mod_base = OTHER; note = 2'-O-methoxy-ethyl modified thymine with phosphorothioate linkage
  modified_base 18: mod_base = OTHER; note = 2'-O-methoxy-ethyl modified nucleotide with phosphorothioate linkage
  modified_base 19: mod_base = OTHER; note = 2'-O-methoxy-ethyl modified nucleotide with phosphorothioate linkage
  modified_base 20: mod_base = OTHER; note = 2'-O-methoxy-ethyl modified nucleotide
taaattttagtttggctgaa

SEQ ID NO: 469 - RNA, 20 nt, synthetic construct
  source 1..20: mol_type = other RNA
  modified_base 1: mod_base = OTHER; note = 2'-O-methoxy-ethyl modified thymine with phosphorothioate linkage
  modified_base 2: mod_base = OTHER; note = 2'-O-methoxy-ethyl modified nucleotide with phosphorothioate linkage
  modified_base 3: mod_base = OTHER; note = 2'-O-methoxy-ethyl modified nucleotide with phosphorothioate linkage
  modified_base 4: mod_base = OTHER; note = 2'-O-methoxy-ethyl modified nucleotide with phosphorothioate linkage
  modified_base 5: mod_base = OTHER; note = 2'-O-methoxy-ethyl modified thymine with phosphorothioate linkage
  modified_base 6: mod_base = OTHER; note = 2'-O-methoxy-ethyl modified thymine with phosphorothioate linkage
  modified_base 7: mod_base = OTHER; note = 2'-O-methoxy-ethyl modified thymine with phosphorothioate linkage
  modified_base 8: mod_base = OTHER; note = 2'-O-methoxy-ethyl modified thymine with phosphorothioate linkage
  modified_base 9: mod_base = OTHER; note = 2'-O-methoxy-ethyl modified nucleotide with phosphorothioate linkage
  modified_base 10: mod_base = OTHER; note = 2'-O-methoxy-ethyl modified nucleotide with phosphorothioate linkage
  modified_base 11: mod_base = OTHER; note = 2'-O-methoxy-ethyl modified thymine with phosphorothioate linkage
  modified_base 12: mod_base = OTHER; note = 2'-O-methoxy-ethyl modified thymine with phosphorothioate linkage
  modified_base 13: mod_base = OTHER; note = 2'-O-methoxy-ethyl modified thymine with phosphorothioate linkage
  modified_base 14: mod_base = OTHER; note = 2'-O-methoxy-ethyl modified nucleotide with phosphorothioate linkage
  modified_base 15: mod_base = OTHER; note = 2'-O-methoxy-ethyl modified nucleotide with phosphorothioate linkage
  modified_base 16: mod_base = OTHER; note = 2'-O-methoxy-ethyl modified nucleotide with phosphorothioate linkage
  modified_base 17: mod_base = OTHER; note = 2'-O-methoxy-ethyl modified thymine
  modified_base 18: mod_base = OTHER; note = 2'-O-methoxy-ethyl modified nucleotide with phosphorothioate linkage
  modified_base 19: mod_base = OTHER; note = 2'-O-methoxy-ethyl modified nucleotide with phosphorothioate linkage
  modified_base 20: mod_base = OTHER; note = 2'-O-methoxy-ethyl modified nucleotide
taaattttagtttggctgaa

SEQ ID NO: 470 - RNA, 20 nt, synthetic construct
  source 1..20: mol_type = other RNA
  modified_base 1: mod_base = OTHER; note = 2'-O-methoxy-ethyl modified thymine with phosphorothioate linkage
  modified_base 2: mod_base = OTHER; note = 2'-O-methoxy-ethyl modified nucleotide with phosphorothioate linkage
  modified_base 3: mod_base = OTHER; note = 2'-O-methoxy-ethyl modified nucleotide with phosphorothioate linkage
  modified_base 4: mod_base = OTHER; note = 2'-O-methoxy-ethyl modified nucleotide with phosphorothioate linkage
  modified_base 5: mod_base = OTHER; note = 2'-O-methoxy-ethyl modified thymine with phosphorothioate linkage
  modified_base 6: mod_base = OTHER; note = 2'-O-methoxy-ethyl modified thymine with phosphorothioate linkage
  modified_base 7: mod_base = OTHER; note = 2'-O-methoxy-ethyl modified thymine with phosphorothioate linkage
  modified_base 8: mod_base = OTHER; note = 2'-O-methoxy-ethyl modified thymine with phosphorothioate linkage
  modified_base 9: mod_base = OTHER; note = 2'-O-methoxy-ethyl modified nucleotide with phosphorothioate linkage
  modified_base 10: mod_base = OTHER; note = 2'-O-methoxy-ethyl modified nucleotide with phosphorothioate linkage
  modified_base 11: mod_base = OTHER; note = 2'-O-methoxy-ethyl modified thymine with phosphorothioate linkage
  modified_base 12: mod_base = OTHER; note = 2'-O-methoxy-ethyl modified thymine with phosphorothioate linkage
  modified_base 13: mod_base = OTHER; note = 2'-O-methoxy-ethyl modified thymine with phosphorothioate linkage
  modified_base 14: mod_base = OTHER; note = 2'-O-methoxy-ethyl modified nucleotide with phosphorothioate linkage
  modified_base 15: mod_base = OTHER; note = 2'-O-methoxy-ethyl modified nucleotide with phosphorothioate linkage
  modified_base 16: mod_base = OTHER; note = 2'-O-methoxy-ethyl modified nucleotide with phosphorothioate linkage
  modified_base 17: mod_base = OTHER; note = 2'-O-methoxy-ethyl modified thymine with phosphorothioate linkage
  modified_base 18: mod_base = OTHER; note = 2'-O-methoxy-ethyl modified nucleotide
  modified_base 19: mod_base = OTHER; note = 2'-O-methoxy-ethyl modified nucleotide with phosphorothioate linkage
  modified_base 20: mod_base = OTHER; note = 2'-O-methoxy-ethyl modified nucleotide
taaattttagtttggctgaa

SEQ ID NO: 471 - RNA, 20 nt, synthetic construct
  source 1..20: mol_type = other RNA
  modified_base 1: mod_base = OTHER; note = 2'-O-methoxy-ethyl modified thymine with phosphorothioate linkage
  modified_base 2: mod_base = OTHER; note = 2'-O-methoxy-ethyl modified nucleotide
  modified_base 3: mod_base = OTHER; note = 2'-O-methoxy-ethyl modified nucleotide with phosphorothioate linkage
  modified_base 4: mod_base = OTHER; note = 2'-O-methoxy-ethyl modified nucleotide with phosphorothioate linkage
  modified_base 5: mod_base = OTHER; note = 2'-O-methoxy-ethyl modified thymine with phosphorothioate linkage
  modified_base 6: mod_base = OTHER; note = 2'-O-methoxy-ethyl modified thymine with phosphorothioate linkage
  modified_base 7: mod_base = OTHER; note = 2'-O-methoxy-ethyl modified thymine with phosphorothioate linkage
  modified_base 8: mod_base = OTHER; note = 2'-O-methoxy-ethyl modified thymine with phosphorothioate linkage
  modified_base 9: mod_base = OTHER; note = 2'-O-methoxy-ethyl modified nucleotide with phosphorothioate linkage
  modified_base 10: mod_base = OTHER; note = 2'-O-methoxy-ethyl modified nucleotide with phosphorothioate linkage
  modified_base 11: mod_base = OTHER; note = 2'-O-methoxy-ethyl modified thymine with phosphorothioate linkage
  modified_base 12: mod_base = OTHER; note = 2'-O-methoxy-ethyl modified thymine with phosphorothioate linkage
  modified_base 13: mod_base = OTHER; note = 2'-O-methoxy-ethyl modified thymine with phosphorothioate linkage
  modified_base 14: mod_base = OTHER; note = 2'-O-methoxy-ethyl modified nucleotide with phosphorothioate linkage
  modified_base 15: mod_base = OTHER; note = 2'-O-methoxy-ethyl modified nucleotide with phosphorothioate linkage
  modified_base 16: mod_base = OTHER; note = 2'-O-methoxy-ethyl modified nucleotide with phosphorothioate linkage
  modified_base 17: mod_base = OTHER; note = 2'-O-methoxy-ethyl modified thymine with phosphorothioate linkage
  modified_base 18: mod_base = OTHER; note = 2'-O-methoxy-ethyl modified nucleotide
  modified_base 19: mod_base = OTHER; note = 2'-O-methoxy-ethyl modified nucleotide with phosphorothioate linkage
  modified_base 20: mod_base = OTHER; note = 2'-O-methoxy-ethyl modified nucleotide
taaattttagtttggctgaa

SEQ ID NO: 472 - RNA, 20 nt, synthetic construct
  source 1..20: mol_type = other RNA
  modified_base 1: mod_base = OTHER; note = 2'-O-methoxy-ethyl modified thymine with phosphorothioate linkage
  modified_base 2: mod_base = OTHER; note = 2'-O-methoxy-ethyl modified nucleotide with phosphorothioate linkage
  modified_base 3: mod_base = OTHER; note = 2'-O-methoxy-ethyl modified nucleotide
  modified_base 4: mod_base = OTHER; note = 2'-O-methoxy-ethyl modified nucleotide with phosphorothioate linkage
  modified_base 5: mod_base = OTHER; note = 2'-O-methoxy-ethyl modified thymine with phosphorothioate linkage
  modified_base 6: mod_base = OTHER; note = 2'-O-methoxy-ethyl modified thymine with phosphorothioate linkage
  modified_base 7: mod_base = OTHER; note = 2'-O-methoxy-ethyl modified thymine with phosphorothioate linkage
  modified_base 8: mod_base = OTHER; note = 2'-O-methoxy-ethyl modified thymine with phosphorothioate linkage
  modified_base 9: mod_base = OTHER; note = 2'-O-methoxy-ethyl modified nucleotide with phosphorothioate linkage
  modified_base 10: mod_base = OTHER; note = 2'-O-methoxy-ethyl modified nucleotide with phosphorothioate linkage
  modified_base 11: mod_base = OTHER; note = 2'-O-methoxy-ethyl modified thymine with phosphorothioate linkage
  modified_base 12: mod_base = OTHER; note = 2'-O-methoxy-ethyl modified thymine with phosphorothioate linkage
  modified_base 13: mod_base = OTHER; note = 2'-O-methoxy-ethyl modified thymine with phosphorothioate linkage
  modified_base 14: mod_base = OTHER; note = 2'-O-methoxy-ethyl modified nucleotide with phosphorothioate linkage
  modified_base 15: mod_base = OTHER; note = 2'-O-methoxy-ethyl modified nucleotide with phosphorothioate linkage
  modified_base 16: mod_base = OTHER; note = 2'-O-methoxy-ethyl modified nucleotide with phosphorothioate linkage
  modified_base 17: mod_base = OTHER; note = 2'-O-methoxy-ethyl modified thymine
  modified_base 18: mod_base = OTHER; note = 2'-O-methoxy-ethyl modified nucleotide with phosphorothioate linkage
  modified_base 19: mod_base = OTHER; note = 2'-O-methoxy-ethyl modified nucleotide with phosphorothioate linkage
  modified_base 20: mod_base = OTHER; note = 2'-O-methoxy-ethyl modified nucleotide
taaattttagtttggctgaa

SEQ ID NO: 473 - RNA, 20 nt, synthetic construct
  source 1..20: mol_type = other RNA
  modified_base 1: mod_base = OTHER; note = 2'-O-methoxy-ethyl modified thymine with phosphorothioate linkage
  modified_base 2: mod_base = OTHER; note = 2'-O-methoxy-ethyl modified nucleotide with phosphorothioate linkage
  modified_base 3: mod_base = OTHER; note = 2'-O-methoxy-ethyl modified nucleotide with phosphorothioate linkage
  modified_base 4: mod_base = OTHER; note = 2'-O-methoxy-ethyl modified nucleotide
  modified_base 5: mod_base = OTHER; note = 2'-O-methoxy-ethyl modified thymine with phosphorothioate linkage
  modified_base 6: mod_base = OTHER; note = 2'-O-methoxy-ethyl modified thymine with phosphorothioate linkage
  modified_base 7: mod_base = OTHER; note = 2'-O-methoxy-ethyl modified thymine with phosphorothioate linkage
  modified_base 8: mod_base = OTHER; note = 2'-O-methoxy-ethyl modified thymine with phosphorothioate linkage
  modified_base 9: mod_base = OTHER; note = 2'-O-methoxy-ethyl modified nucleotide with phosphorothioate linkage
  modified_base 10: mod_base = OTHER; note = 2'-O-methoxy-ethyl modified nucleotide with phosphorothioate linkage
  modified_base 11: mod_base = OTHER; note = 2'-O-methoxy-ethyl modified thymine with phosphorothioate linkage
  modified_base 12: mod_base = OTHER; note = 2'-O-methoxy-ethyl modified thymine with phosphorothioate linkage
  modified_base 13: mod_base = OTHER; note = 2'-O-methoxy-ethyl modified thymine with phosphorothioate linkage
  modified_base 14: mod_base = OTHER; note = 2'-O-methoxy-ethyl modified nucleotide with phosphorothioate linkage
  modified_base 15: mod_base = OTHER; note = 2'-O-methoxy-ethyl modified nucleotide with phosphorothioate linkage
  modified_base 16: mod_base = OTHER; note = 2'-O-methoxy-ethyl modified nucleotide
  modified_base 17: mod_base = OTHER; note = 2'-O-methoxy-ethyl modified thymine with phosphorothioate linkage
  modified_base 18: mod_base = OTHER; note = 2'-O-methoxy-ethyl modified nucleotide with phosphorothioate linkage
  modified_base 19: mod_base = OTHER; note = 2'-O-methoxy-ethyl modified nucleotide with phosphorothioate linkage
  modified_base 20: mod_base = OTHER; note = 2'-O-methoxy-ethyl modified nucleotide
taaattttagtttggctgaa

SEQ ID NO: 474 - RNA, 20 nt, synthetic construct
  source 1..20: mol_type = other RNA
  modified_base 1: mod_base = OTHER; note = 2'-O-methoxy-ethyl modified thymine with phosphorothioate linkage
  modified_base 2: mod_base = OTHER; note = 2'-O-methoxy-ethyl modified nucleotide with phosphorothioate linkage
  modified_base 3: mod_base = OTHER; note = 2'-O-methoxy-ethyl modified nucleotide with phosphorothioate linkage
  modified_base 4: mod_base = OTHER; note = 2'-O-methoxy-ethyl modified nucleotide with phosphorothioate linkage
  modified_base 5: mod_base = OTHER; note = 2'-O-methoxy-ethyl modified thymine
  modified_base 6: mod_base = OTHER; note = 2'-O-methoxy-ethyl modified thymine with phosphorothioate linkage
  modified_base 7: mod_base = OTHER; note = 2'-O-methoxy-ethyl modified thymine with phosphorothioate linkage
  modified_base 8: mod_base = OTHER; note = 2'-O-methoxy-ethyl modified thymine with phosphorothioate linkage
  modified_base 9: mod_base = OTHER; note = 2'-O-methoxy-ethyl modified nucleotide with phosphorothioate linkage
  modified_base 10: mod_base = OTHER; note = 2'-O-methoxy-ethyl modified nucleotide with phosphorothioate linkage
  modified_base 11: mod_base = OTHER; note = 2'-O-methoxy-ethyl modified thymine with phosphorothioate linkage
  modified_base 12: mod_base = OTHER; note = 2'-O-methoxy-ethyl modified thymine with phosphorothioate linkage
  modified_base 13: mod_base = OTHER; note = 2'-O-methoxy-ethyl modified thymine with phosphorothioate linkage
  modified_base 14: mod_base = OTHER; note = 2'-O-methoxy-ethyl modified nucleotide with phosphorothioate linkage
  modified_base 15: mod_base = OTHER; note = 2'-O-methoxy-ethyl modified nucleotide
  modified_base 16: mod_base = OTHER; note = 2'-O-methoxy-ethyl modified nucleotide with phosphorothioate linkage
  modified_base 17: mod_base = OTHER; note = 2'-O-methoxy-ethyl modified thymine with phosphorothioate linkage
  modified_base 18: mod_base = OTHER; note = 2'-O-methoxy-ethyl modified nucleotide with phosphorothioate linkage
  modified_base 19: mod_base = OTHER; note = 2'-O-methoxy-ethyl modified nucleotide with phosphorothioate linkage
  modified_base 20: mod_base = OTHER; note = 2'-O-methoxy-ethyl modified nucleotide
taaattttagtttggctgaa

SEQ ID NO: 475 - RNA, 20 nt, synthetic construct
  source 1..20: mol_type = other RNA
  modified_base 1: mod_base = OTHER; note = 2'-O-methoxy-ethyl modified thymine with phosphorothioate linkage
  modified_base 2: mod_base = OTHER; note = 2'-O-methoxy-ethyl modified nucleotide with phosphorothioate linkage
  modified_base 3: mod_base = OTHER; note = 2'-O-methoxy-ethyl modified nucleotide with phosphorothioate linkage
  modified_base 4: mod_base = OTHER; note = 2'-O-methoxy-ethyl modified nucleotide with phosphorothioate linkage
  modified_base 5: mod_base = OTHER; note = 2'-O-methoxy-ethyl modified thymine with phosphorothioate linkage
  modified_base 6: mod_base = OTHER; note = 2'-O-methoxy-ethyl modified thymine
  modified_base 7: mod_base = OTHER; note = 2'-O-methoxy-ethyl modified thymine with phosphorothioate linkage
  modified_base 8: mod_base = OTHER; note = 2'-O-methoxy-ethyl modified thymine with phosphorothioate linkage
  modified_base 9: mod_base = OTHER; note = 2'-O-methoxy-ethyl modified nucleotide with phosphorothioate linkage
  modified_base 10: mod_base = OTHER; note = 2'-O-methoxy-ethyl modified nucleotide with phosphorothioate linkage
  modified_base 11: mod_base = OTHER; note = 2'-O-methoxy-ethyl modified thymine with phosphorothioate linkage
  modified_base 12: mod_base = OTHER; note = 2'-O-methoxy-ethyl modified thymine with phosphorothioate linkage
  modified_base 13: mod_base = OTHER; note = 2'-O-methoxy-ethyl modified thymine with phosphorothioate linkage
  modified_base 14: mod_base = OTHER; note = 2'-O-methoxy-ethyl modified nucleotide
  modified_base 15: mod_base = OTHER; note = 2'-O-methoxy-ethyl modified nucleotide with phosphorothioate linkage
  modified_base 16: mod_base = OTHER; note = 2'-O-methoxy-ethyl modified nucleotide with phosphorothioate linkage
  modified_base 17: mod_base = OTHER; note = 2'-O-methoxy-ethyl modified thymine with phosphorothioate linkage
  modified_base 18: mod_base = OTHER; note = 2'-O-methoxy-ethyl modified nucleotide with phosphorothioate linkage
  modified_base 19: mod_base = OTHER; note = 2'-O-methoxy-ethyl modified nucleotide with phosphorothioate linkage
  modified_base 20: mod_base = OTHER; note = 2'-O-methoxy-ethyl modified nucleotide
taaattttagtttggctgaa

SEQ ID NO: 476 - RNA, 20 nt, synthetic construct
  source 1..20: mol_type = other RNA
  modified_base 1: mod_base = OTHER; note = 2'-O-methoxy-ethyl modified thymine with phosphorothioate linkage
  modified_base 2: mod_base = OTHER; note = 2'-O-methoxy-ethyl modified nucleotide with phosphorothioate linkage
  modified_base 3: mod_base = OTHER; note = 2'-O-methoxy-ethyl modified nucleotide with phosphorothioate linkage
  modified_base 4: mod_base = OTHER; note = 2'-O-methoxy-ethyl modified nucleotide with phosphorothioate linkage
  modified_base 5: mod_base = OTHER; note = 2'-O-methoxy-ethyl modified thymine with phosphorothioate linkage
  modified_base 6: mod_base = OTHER; note = 2'-O-methoxy-ethyl modified thymine with phosphorothioate linkage
  modified_base 7: mod_base = OTHER; note = 2'-O-methoxy-ethyl modified thymine
  modified_base 8: mod_base = OTHER; note = 2'-O-methoxy-ethyl modified thymine with phosphorothioate linkage
  modified_base 9: mod_base = OTHER; note = 2'-O-methoxy-ethyl modified nucleotide with phosphorothioate linkage
  modified_base 10: mod_base = OTHER; note = 2'-O-methoxy-ethyl modified nucleotide with phosphorothioate linkage
  modified_base 11: mod_base = OTHER; note = 2'-O-methoxy-ethyl modified thymine with phosphorothioate linkage
  modified_base 12: mod_base = OTHER; note = 2'-O-methoxy-ethyl modified thymine with phosphorothioate linkage
  modified_base 13: mod_base = OTHER; note = 2'-O-methoxy-ethyl modified thymine
  modified_base 14: mod_base = OTHER; note = 2'-O-methoxy-ethyl modified nucleotide with phosphorothioate linkage
  modified_base 15: mod_base = OTHER; note = 2'-O-methoxy-ethyl modified nucleotide with phosphorothioate linkage
  modified_base 16: mod_base = OTHER; note = 2'-O-methoxy-ethyl modified nucleotide with phosphorothioate linkage
  modified_base 17: mod_base = OTHER; note = 2'-O-methoxy-ethyl modified thymine with phosphorothioate linkage
  modified_base 18: mod_base = OTHER; note = 2'-O-methoxy-ethyl modified nucleotide with phosphorothioate linkage
  modified_base 19: mod_base = OTHER; note = 2'-O-methoxy-ethyl modified nucleotide with phosphorothioate linkage
  modified_base 20: mod_base = OTHER; note = 2'-O-methoxy-ethyl modified nucleotide
taaattttagtttggctgaa

SEQ ID NO: 477 - RNA, 20 nt, synthetic construct
  source 1..20: mol_type = other RNA
  modified_base 1: mod_base = OTHER; note = 2'-O-methoxy-ethyl modified thymine with phosphorothioate linkage
  modified_base 2: mod_base = OTHER; note = 2'-O-methoxy-ethyl modified nucleotide with phosphorothioate linkage
  modified_base 3: mod_base = OTHER; note = 2'-O-methoxy-ethyl modified nucleotide with phosphorothioate linkage
  modified_base 4: mod_base = OTHER; note = 2'-O-methoxy-ethyl modified nucleotide with phosphorothioate linkage
  modified_base 5: mod_base = OTHER; note = 2'-O-methoxy-ethyl modified thymine with phosphorothioate linkage
  modified_base 6: mod_base = OTHER; note = 2'-O-methoxy-ethyl modified thymine with phosphorothioate linkage
  modified_base 7: mod_base = OTHER; note = 2'-O-methoxy-ethyl modified thymine with phosphorothioate linkage
  modified_base 8: mod_base = OTHER; note = 2'-O-methoxy-ethyl modified thymine
  modified_base 9: mod_base = OTHER; note = 2'-O-methoxy-ethyl modified nucleotide with phosphorothioate linkage
  modified_base 10: mod_base = OTHER; note = 2'-O-methoxy-ethyl modified nucleotide with phosphorothioate linkage
  modified_base 11: mod_base = OTHER; note = 2'-O-methoxy-ethyl modified thymine with phosphorothioate linkage
  modified_base 12: mod_base = OTHER; note = 2'-O-methoxy-ethyl modified thymine
  modified_base 13: mod_base = OTHER; note = 2'-O-methoxy-ethyl modified thymine with phosphorothioate linkage
  modified_base 14: mod_base = OTHER; note = 2'-O-methoxy-ethyl modified nucleotide with phosphorothioate linkage
  modified_base 15: mod_base = OTHER; note = 2'-O-methoxy-ethyl modified nucleotide with phosphorothioate linkage
  modified_base 16: mod_base = OTHER; note = 2'-O-methoxy-ethyl modified nucleotide with phosphorothioate linkage
  modified_base 17: mod_base = OTHER; note = 2'-O-methoxy-ethyl modified thymine with phosphorothioate linkage
  modified_base 18: mod_base = OTHER; note = 2'-O-methoxy-ethyl modified nucleotide with phosphorothioate linkage
  modified_base 19: mod_base = OTHER; note = 2'-O-methoxy-ethyl modified nucleotide with phosphorothioate linkage
  modified_base 20: mod_base = OTHER; note = 2'-O-methoxy-ethyl modified nucleotide
taaattttagtttggctgaa

SEQ ID NO: 478 - RNA, 20 nt, synthetic construct
  source 1..20: mol_type = other RNA
  modified_base 1: mod_base = OTHER; note = 2'-O-methoxy-ethyl modified thymine with phosphorothioate linkage
  modified_base 2: mod_base = OTHER; note = 2'-O-methoxy-ethyl modified nucleotide with phosphorothioate linkage
  modified_base 3: mod_base = OTHER; note = 2'-O-methoxy-ethyl modified nucleotide with phosphorothioate linkage
  modified_base 4: mod_base = OTHER; note = 2'-O-methoxy-ethyl modified nucleotide with phosphorothioate linkage
  modified_base 5: mod_base = OTHER; note = 2'-O-methoxy-ethyl modified thymine with phosphorothioate linkage
  modified_base 6: mod_base = OTHER; note = 2'-O-methoxy-ethyl modified thymine with phosphorothioate linkage
  modified_base 7: mod_base = OTHER; note = 2'-O-methoxy-ethyl modified thymine with phosphorothioate linkage
  modified_base 8: mod_base = OTHER; note = 2'-O-methoxy-ethyl modified thymine with phosphorothioate linkage
  modified_base 9: mod_base = OTHER; note = 2'-O-methoxy-ethyl modified nucleotide
  modified_base 10: mod_base = OTHER; note = 2'-O-methoxy-ethyl modified nucleotide with phosphorothioate linkage
  modified_base 11: mod_base = OTHER; note = 2'-O-methoxy-ethyl modified thymine
  modified_base 12: mod_base = OTHER; note = 2'-O-methoxy-ethyl modified thymine with phosphorothioate linkage
  modified_base 13: mod_base = OTHER; note = 2'-O-methoxy-ethyl modified thymine with phosphorothioate linkage
  modified_base 14: mod_base = OTHER; note = 2'-O-methoxy-ethyl modified nucleotide with phosphorothioate linkage
  modified_base 15: mod_base = OTHER; note = 2'-O-methoxy-ethyl modified nucleotide with phosphorothioate linkage
  modified_base 16: mod_base = OTHER; note = 2'-O-methoxy-ethyl modified nucleotide with phosphorothioate linkage
  modified_base 17: mod_base = OTHER; note = 2'-O-methoxy-ethyl modified thymine with phosphorothioate linkage
  modified_base 18: mod_base = OTHER; note = 2'-O-methoxy-ethyl modified nucleotide with phosphorothioate linkage
  modified_base 19: mod_base = OTHER; note = 2'-O-methoxy-ethyl modified nucleotide with phosphorothioate linkage
  modified_base 20: mod_base = OTHER; note = 2'-O-methoxy-ethyl modified nucleotide
taaattttagtttggctgaa

SEQ ID NO: 479 - RNA, 20 nt, synthetic construct
  source 1..20: mol_type = other RNA
  modified_base 1: mod_base = OTHER; note = 2'-O-methoxy-ethyl modified thymine with phosphorothioate linkage
  modified_base 2: mod_base = OTHER; note = 2'-O-methoxy-ethyl modified nucleotide with phosphorothioate linkage
  modified_base 3: mod_base = OTHER; note = 2'-O-methoxy-ethyl modified nucleotide with phosphorothioate linkage
  modified_base 4: mod_base = OTHER; note = 2'-O-methoxy-ethyl modified nucleotide with phosphorothioate linkage
  modified_base 5: mod_base = OTHER; note = 2'-O-methoxy-ethyl modified thymine with phosphorothioate linkage
  modified_base 6: mod_base = OTHER; note = 2'-O-methoxy-ethyl modified thymine with phosphorothioate linkage
  modified_base 7: mod_base = OTHER; note = 2'-O-methoxy-ethyl modified thymine with phosphorothioate linkage
  modified_base 8: mod_base = OTHER; note = 2'-O-methoxy-ethyl modified thymine with phosphorothioate linkage
  modified_base 9: mod_base = OTHER; note = 2'-O-methoxy-ethyl modified nucleotide
  modified_base 10: mod_base = OTHER; note = 2'-O-methoxy-ethyl modified nucleotide
  modified_base 11: mod_base = OTHER; note = 2'-O-methoxy-ethyl modified thymine with phosphorothioate linkage
  modified_base 12: mod_base = OTHER; note = 2'-O-methoxy-ethyl modified thymine with phosphorothioate linkage
  modified_base 13: mod_base = OTHER; note = 2'-O-methoxy-ethyl modified thymine with phosphorothioate linkage
  modified_base 14: mod_base = OTHER; note = 2'-O-methoxy-ethyl modified nucleotide with phosphorothioate linkage
  modified_base 15: mod_base = OTHER; note = 2'-O-methoxy-ethyl modified nucleotide with phosphorothioate linkage
  modified_base 16: mod_base = OTHER; note = 2'-O-methoxy-ethyl modified nucleotide with phosphorothioate linkage
  modified_base 17: mod_base = OTHER; note = 2'-O-methoxy-ethyl modified thymine with phosphorothioate linkage
  modified_base 18: mod_base = OTHER; note = 2'-O-methoxy-ethyl modified nucleotide with phosphorothioate linkage
  modified_base 19: mod_base = OTHER; note = 2'-O-methoxy-ethyl modified nucleotide with phosphorothioate linkage
  modified_base 20: mod_base = OTHER; note = 2'-O-methoxy-ethyl modified nucleotide
taaattttagtttggctgaa

SEQ ID NO: 480 - RNA, 20 nt, synthetic construct
  source 1..20: mol_type = other RNA
  modified_base 1: mod_base = OTHER; note = 2'-O-methoxy-ethyl modified thymine with phosphorothioate linkage
  modified_base 2: mod_base = OTHER; note = 2'-O-methoxy-ethyl modified nucleotide with phosphorothioate linkage
  modified_base 3: mod_base = OTHER; note = 2'-O-methoxy-ethyl modified nucleotide with phosphorothioate linkage
  modified_base 4: mod_base = OTHER; note = 2'-O-methoxy-ethyl modified nucleotide with phosphorothioate linkage
  modified_base 5: mod_base = OTHER; note = 2'-O-methoxy-ethyl modified thymine with phosphorothioate linkage
  modified_base 6: mod_base = OTHER; note = 2'-O-methoxy-ethyl modified thymine with phosphorothioate linkage
  modified_base 7: mod_base = OTHER; note = 2'-O-methoxy-ethyl modified thymine with phosphorothioate linkage
  modified_base 8: mod_base = OTHER; note = 2'-O-methoxy-ethyl modified thymine with phosphorothioate linkage
  modified_base 9: mod_base = OTHER; note = 2'-O-methoxy-ethyl modified nucleotide with phosphorothioate linkage
  modified_base 10: mod_base = OTHER; note = 2'-O-methoxy-ethyl modified nucleotide
  modified_base 11: mod_base = OTHER; note = 2'-O-methoxy-ethyl modified thymine
  modified_base 12: mod_base = OTHER; note = 2'-O-methoxy-ethyl modified thymine with phosphorothioate linkage
  modified_base 13: mod_base = OTHER; note = 2'-O-methoxy-ethyl modified thymine with phosphorothioate linkage
  modified_base 14: mod_base = OTHER; note = 2'-O-methoxy-ethyl modified nucleotide with phosphorothioate linkage
  modified_base 15: mod_base = OTHER; note = 2'-O-methoxy-ethyl modified nucleotide with phosphorothioate linkage
  modified_base 16: mod_base = OTHER; note = 2'-O-methoxy-ethyl modified nucleotide with phosphorothioate linkage
  modified_base 17: mod_base = OTHER; note = 2'-O-methoxy-ethyl modified thymine with phosphorothioate linkage
  modified_base 18: mod_base = OTHER; note = 2'-O-methoxy-ethyl modified nucleotide with phosphorothioate linkage
  modified_base 19: mod_base = OTHER; note = 2'-O-methoxy-ethyl modified nucleotide with phosphorothioate linkage
  modified_base 20: mod_base = OTHER; note = 2'-O-methoxy-ethyl modified nucleotide
taaattttagtttggctgaa

SEQ ID NO: 481 - RNA, 20 nt, synthetic construct
  source 1..20: mol_type = other RNA
  modified_base 1: mod_base = OTHER; note = 2'-O-methoxy-ethyl modified thymine with phosphorothioate linkage
  modified_base 2: mod_base = OTHER; note = 2'-O-methoxy-ethyl modified nucleotide
  modified_base 3: mod_base = OTHER; note = 2'-O-methoxy-ethyl modified nucleotide with phosphorothioate linkage
  modified_base 4: mod_base = OTHER; note = 2'-O-methoxy-ethyl modified nucleotide with phosphorothioate linkage
  modified_base 5: mod_base = OTHER; note = 2'-O-methoxy-ethyl modified thymine with phosphorothioate linkage
  modified_base 6: mod_base = OTHER; note = 2'-O-methoxy-ethyl modified thymine with phosphorothioate linkage
  modified_base 7: mod_base = OTHER; note = 2'-O-methoxy-ethyl modified thymine with phosphorothioate linkage
  modified_base 8: mod_base = OTHER; note = 2'-O-methoxy-ethyl modified thymine with phosphorothioate linkage
  modified_base 9: mod_base = OTHER; note = 2'-O-methoxy-ethyl modified nucleotide with phosphorothioate linkage
  modified_base 10: mod_base = OTHER; note = 2'-O-methoxy-ethyl modified nucleotide with phosphorothioate linkage
  modified_base 11: mod_base = OTHER; note = 2'-O-methoxy-ethyl modified thymine with phosphorothioate linkage
  modified_base 12: mod_base = OTHER; note = 2'-O-methoxy-ethyl modified thymine with phosphorothioate linkage
  modified_base 13: mod_base = OTHER; note = 2'-O-methoxy-ethyl modified thymine with phosphorothioate linkage
  modified_base 14: mod_base = OTHER; note = 2'-O-methoxy-ethyl modified nucleotide with phosphorothioate linkage
  modified_base 15: mod_base = OTHER; note = 2'-O-methoxy-ethyl modified nucleotide with phosphorothioate linkage
  modified_base 16: mod_base = OTHER; note = 2'-O-methoxy-ethyl modified nucleotide with phosphorothioate linkage
  modified_base 17: mod_base = OTHER; note = 2'-O-methoxy-ethyl modified thymine
  modified_base 18: mod_base = OTHER; note = 2'-O-methoxy-ethyl modified nucleotide with phosphorothioate linkage
  modified_base 19: mod_base = OTHER; note = 2'-O-methoxy-ethyl modified nucleotide with phosphorothioate linkage
  modified_base 20: mod_base = OTHER; note = 2'-O-methoxy-ethyl modified nucleotide
taaattttagtttggctgaa

SEQ ID NO: 482 - RNA, 20 nt, synthetic construct
  source 1..20: mol_type = other RNA
  modified_base 1: mod_base = OTHER; note = 2'-O-methoxy-ethyl modified thymine with phosphorothioate linkage
  modified_base 2: mod_base = OTHER; note = 2'-O-methoxy-ethyl modified nucleotide with phosphorothioate linkage
  modified_base 3: mod_base = OTHER; note = 2'-O-methoxy-ethyl modified nucleotide
  modified_base 4: mod_base = OTHER; note = 2'-O-methoxy-ethyl modified nucleotide with phosphorothioate linkage
  modified_base 5: mod_base = OTHER; note = 2'-O-methoxy-ethyl modified thymine with phosphorothioate linkage
  modified_base 6: mod_base = OTHER; note = 2'-O-methoxy-ethyl modified thymine with phosphorothioate linkage
  modified_base 7: mod_base = OTHER; note = 2'-O-methoxy-ethyl modified thymine with phosphorothioate linkage
  modified_base 8: mod_base = OTHER; note = 2'-O-methoxy-ethyl modified thymine with phosphorothioate linkage
  modified_base 9: mod_base = OTHER; note = 2'-O-methoxy-ethyl modified nucleotide with phosphorothioate linkage
  modified_base 10: mod_base = OTHER; note = 2'-O-methoxy-ethyl modified nucleotide with phosphorothioate linkage
  modified_base 11: mod_base = OTHER; note = 2'-O-methoxy-ethyl modified thymine with phosphorothioate linkage
  modified_base 12: mod_base = OTHER; note = 2'-O-methoxy-ethyl modified thymine with phosphorothioate linkage
  modified_base 13: mod_base = OTHER; note = 2'-O-methoxy-ethyl modified thymine with phosphorothioate linkage
  modified_base 14: mod_base = OTHER; note = 2'-O-methoxy-ethyl modified nucleotide with phosphorothioate linkage
  modified_base 15: mod_base = OTHER; note = 2'-O-methoxy-ethyl modified nucleotide with phosphorothioate linkage
  modified_base 16: mod_base = OTHER; note = 2'-O-methoxy-ethyl modified nucleotide with phosphorothioate linkage
  modified_base 17: mod_base = OTHER; note = 2'-O-methoxy-ethyl modified thymine with phosphorothioate linkage
  modified_base 18: mod_base = OTHER; note = 2'-O-methoxy-ethyl modified nucleotide
  modified_base 19: mod_base = OTHER; note = 2'-O-methoxy-ethyl modified nucleotide with phosphorothioate linkage
  modified_base 20: mod_base = OTHER; note = 2'-O-methoxy-ethyl modified nucleotide
taaattttagtttggctgaa

SEQ ID NO: 483 - RNA, 20 nt, synthetic construct
  source 1..20: mol_type = other RNA
  modified_base 1: mod_base = OTHER; note = 2'-O-methoxy-ethyl modified thymine with phosphorothioate linkage
  modified_base 2: mod_base = OTHER; note = 2'-O-methoxy-ethyl modified nucleotide with phosphorothioate linkage
  modified_base 3: mod_base = OTHER; note = 2'-O-methoxy-ethyl modified nucleotide
  modified_base 4: mod_base = OTHER; note = 2'-O-methoxy-ethyl modified nucleotide with phosphorothioate linkage
  modified_base 5: mod_base = OTHER; note = 2'-O-methoxy-ethyl modified thymine with phosphorothioate linkage
  modified_base 6: mod_base = OTHER; note = 2'-O-methoxy-ethyl modified thymine with phosphorothioate linkage
  modified_base 7: mod_base = OTHER; note = 2'-O-methoxy-ethyl modified thymine with phosphorothioate linkage
  modified_base 8: mod_base = OTHER; note = 2'-O-methoxy-ethyl modified thymine with phosphorothioate linkage
  modified_base 9: mod_base = OTHER; note = 2'-O-methoxy-ethyl modified nucleotide with phosphorothioate linkage
  modified_base 10: mod_base = OTHER; note = 2'-O-methoxy-ethyl modified nucleotide with phosphorothioate linkage
  modified_base 11: mod_base = OTHER; note = 2'-O-methoxy-ethyl modified thymine with phosphorothioate linkage
  modified_base 12: mod_base = OTHER; note = 2'-O-methoxy-ethyl modified thymine with phosphorothioate linkage
  modified_base 13: mod_base = OTHER; note = 2'-O-methoxy-ethyl modified thymine with phosphorothioate linkage
  modified_base 14: mod_base = OTHER; note = 2'-O-methoxy-ethyl modified nucleotide with phosphorothioate linkage
  modified_base 15: mod_base = OTHER; note = 2'-O-methoxy-ethyl modified nucleotide with phosphorothioate linkage
  modified_base 16: mod_base = OTHER; note = 2'-O-methoxy-ethyl modified nucleotide
  modified_base 17: mod_base = OTHER; note = 2'-O-methoxy-ethyl modified thymine with phosphorothioate linkage
  modified_base 18: mod_base = OTHER; note = 2'-O-methoxy-ethyl modified nucleotide with phosphorothioate linkage
  modified_base 19: mod_base = OTHER; note = 2'-O-methoxy-ethyl modified nucleotide with phosphorothioate linkage
  modified_base 20: mod_base = OTHER; note = 2'-O-methoxy-ethyl modified nucleotide
taaattttagtttggctgaa

SEQ ID NO: 484 - RNA, 20 nt, synthetic construct
  source 1..20: mol_type = other RNA
  modified_base 1: mod_base = OTHER; note = 2'-O-methoxy-ethyl modified thymine with phosphorothioate linkage
  modified_base 2: mod_base = OTHER; note = 2'-O-methoxy-ethyl modified nucleotide with phosphorothioate linkage
  modified_base 3: mod_base = OTHER; note = 2'-O-methoxy-ethyl modified nucleotide with phosphorothioate linkage
  modified_base 4: mod_base = OTHER; note = 2'-O-methoxy-ethyl modified nucleotide
  modified_base 5: mod_base = OTHER; note = 2'-O-methoxy-ethyl modified thymine with phosphorothioate linkage
  modified_base 6: mod_base = OTHER; note = 2'-O-methoxy-ethyl modified thymine with phosphorothioate linkage
  modified_base 7: mod_base = OTHER; note = 2'-O-methoxy-ethyl modified thymine with phosphorothioate linkage
  modified_base 8: mod_base = OTHER; note = 2'-O-methoxy-ethyl modified thymine with phosphorothioate linkage
  modified_base 9: mod_base = OTHER; note = 2'-O-methoxy-ethyl modified nucleotide with phosphorothioate linkage
  modified_base 10: mod_base = OTHER; note = 2'-O-methoxy-ethyl modified nucleotide with phosphorothioate linkage
  modified_base 11: mod_base = OTHER; note = 2'-O-methoxy-ethyl modified thymine with phosphorothioate linkage
  modified_base 12: mod_base = OTHER; note = 2'-O-methoxy-ethyl modified thymine with phosphorothioate linkage
  modified_base 13: mod_base = OTHER; note = 2'-O-methoxy-ethyl modified thymine with phosphorothioate linkage
  modified_base 14: mod_base = OTHER; note = 2'-O-methoxy-ethyl modified nucleotide with phosphorothioate linkage
  modified_base 15: mod_base = OTHER; note = 2'-O-methoxy-ethyl modified nucleotide with phosphorothioate linkage
  modified_base 16: mod_base = OTHER; note = 2'-O-methoxy-ethyl modified nucleotide with phosphorothioate linkage
  modified_base 17: mod_base = OTHER; note = 2'-O-methoxy-ethyl modified thymine
  modified_base 18: mod_base = OTHER; note = 2'-O-methoxy-ethyl modified nucleotide with phosphorothioate linkage
  modified_base 19: mod_base = OTHER; note = 2'-O-methoxy-ethyl modified nucleotide with phosphorothioate linkage
  modified_base 20: mod_base = OTHER; note = 2'-O-methoxy-ethyl modified nucleotide
taaattttagtttggctgaa

SEQ ID NO: 485 - RNA, 20 nt, synthetic construct
  source 1..20: mol_type = other RNA
  modified_base 1: mod_base = OTHER; note = 2'-O-methoxy-ethyl modified thymine with phosphorothioate linkage
  modified_base 2: mod_base = OTHER; note = 2'-O-methoxy-ethyl modified nucleotide with phosphorothioate linkage
  modified_base 3: mod_base = OTHER; note = 2'-O-methoxy-ethyl modified nucleotide with phosphorothioate linkage
  modified_base 4: mod_base = OTHER; note = 2'-O-methoxy-ethyl modified nucleotide
  modified_base 5: mod_base = OTHER; note = 2'-O-methoxy-ethyl modified thymine with phosphorothioate linkage
  modified_base 6: mod_base = OTHER; note = 2'-O-methoxy-ethyl modified thymine with phosphorothioate linkage
  modified_base 7: mod_base = OTHER; note = 2'-O-methoxy-ethyl modified thymine with phosphorothioate linkage
  modified_base 8: mod_base = OTHER; note = 2'-O-methoxy-ethyl modified thymine with phosphorothioate linkage
  modified_base 9: mod_base = OTHER; note = 2'-O-methoxy-ethyl modified nucleotide with phosphorothioate linkage
  modified_base 10: mod_base = OTHER; note = 2'-O-methoxy-ethyl modified nucleotide with phosphorothioate linkage
  modified_base 11: mod_base = OTHER; note = 2'-O-methoxy-ethyl modified thymine with phosphorothioate linkage
  modified_base 12: mod_base = OTHER; note = 2'-O-methoxy-ethyl modified thymine with phosphorothioate linkage
  modified_base 13: mod_base = OTHER; note = 2'-O-methoxy-ethyl modified thymine with phosphorothioate linkage
  modified_base 14: mod_base = OTHER; note = 2'-O-methoxy-ethyl modified nucleotide with phosphorothioate linkage
  modified_base 15: mod_base = OTHER; note = 2'-O-methoxy-ethyl modified nucleotide
  modified_base 16: mod_base = OTHER; note = 2'-O-methoxy-ethyl modified nucleotide with phosphorothioate linkage
  modified_base 17: mod_base = OTHER; note = 2'-O-methoxy-ethyl modified thymine with phosphorothioate linkage
  modified_base 18: mod_base = OTHER; note = 2'-O-methoxy-ethyl modified nucleotide with phosphorothioate linkage
  modified_base 19: mod_base = OTHER; note = 2'-O-methoxy-ethyl modified nucleotide with phosphorothioate linkage
  modified_base 20: mod_base = OTHER; note = 2'-O-methoxy-ethyl modified nucleotide
taaattttagtttggctgaa

SEQ ID NO: 486 - RNA, 20 nt, synthetic construct
  source 1..20: mol_type = other RNA
  modified_base 1: mod_base = OTHER; note = 2'-O-methoxy-ethyl modified thymine with phosphorothioate linkage
  modified_base 2: mod_base = OTHER; note = 2'-O-methoxy-ethyl modified nucleotide with phosphorothioate linkage
  modified_base 3: mod_base = OTHER; note = 2'-O-methoxy-ethyl modified nucleotide with phosphorothioate linkage
  modified_base 4: mod_base = OTHER; note = 2'-O-methoxy-ethyl modified nucleotide with phosphorothioate linkage
  modified_base 5: mod_base = OTHER; note = 2'-O-methoxy-ethyl modified thymine
  modified_base 6: mod_base = OTHER; note = 2'-O-methoxy-ethyl modified thymine with phosphorothioate linkage
  modified_base 7: mod_base = OTHER; note = 2'-O-methoxy-ethyl modified thymine with phosphorothioate linkage
  modified_base 8: mod_base = OTHER; note = 2'-O-methoxy-ethyl modified thymine with phosphorothioate linkage
  modified_base 9: mod_base = OTHER; note = 2'-O-methoxy-ethyl modified nucleotide with phosphorothioate linkage
  modified_base 10: mod_base = OTHER; note = 2'-O-methoxy-ethyl modified nucleotide with phosphorothioate linkage
  modified_base 11: mod_base = OTHER; note = 2'-O-methoxy-ethyl modified thymine with phosphorothioate linkage
  modified_base 12: mod_base = OTHER; note = 2'-O-methoxy-ethyl modified thymine with phosphorothioate linkage
  modified_base 13: mod_base = OTHER; note = 2'-O-methoxy-ethyl modified thymine with phosphorothioate linkage
  modified_base 14: mod_base = OTHER; note = 2'-O-methoxy-ethyl modified nucleotide with phosphorothioate linkage
  modified_base 15: mod_base = OTHER; note = 2'-O-methoxy-ethyl modified nucleotide with phosphorothioate linkage
  modified_base 16: mod_base = OTHER; note = 2'-O-methoxy-ethyl modified nucleotide
  modified_base 17: mod_base = OTHER; note = 2'-O-methoxy-ethyl modified thymine with phosphorothioate linkage
  modified_base 18: mod_base = OTHER; note = 2'-O-methoxy-ethyl modified nucleotide with phosphorothioate linkage
  modified_base 19: mod_base = OTHER; note = 2'-O-methoxy-ethyl modified nucleotide with phosphorothioate linkage
  modified_base 20: mod_base = OTHER; note = 2'-O-methoxy-ethyl modified nucleotide
taaattttagtttggctgaa

SEQ ID NO: 487 - RNA, 20 nt, synthetic construct
  source 1..20: mol_type = other RNA
  modified_base 1: mod_base = OTHER; note = 2'-O-methoxy-ethyl modified nucleotide with phosphorothioate linkage
  modified_base 2: mod_base = OTHER; note = 2'-O-methoxy-ethyl modified nucleotide with phosphorothioate linkage
  modified_base 3: mod_base = OTHER; note = 2'-O-methoxy-ethyl modified nucleotide with phosphorothioate linkage
  modified_base 4: mod_base = OTHER; note = 2'-O-methoxy-ethyl modified nucleotide with phosphorothioate linkage
  modified_base 5: mod_base = OTHER; note = 2'-O-methoxy-ethyl modified nucleotide with phosphorothioate linkage
  modified_base 6: mod_base = OTHER; note = 2'-O-methoxy-ethyl modified thymine with phosphorothioate linkage
  modified_base 7: mod_base = OTHER; note = 2'-O-methoxy-ethyl modified nucleotide with phosphorothioate linkage
  modified_base 8: mod_base = OTHER; note = 2'-O-methoxy-ethyl modified nucleotide with phosphorothioate linkage
  modified_base 9: mod_base = OTHER; note = 2'-O-methoxy-ethyl modified nucleotide with phosphorothioate linkage
  modified_base 10: mod_base = OTHER; note = 2'-O-methoxy-ethyl modified nucleotide with phosphorothioate linkage
  modified_base 11: mod_base = OTHER; note = 2'-O-methoxy-ethyl modified nucleotide with phosphorothioate linkage
  modified_base 12: mod_base = OTHER; note = 2'-O-methoxy-ethyl modified nucleotide with phosphorothioate linkage
  modified_base 13: mod_base = OTHER; note = 2'-O-methoxy-ethyl modified nucleotide with phosphorothioate linkage
  modified_base 14: mod_base = OTHER; note = 2'-O-methoxy-ethyl modified thymine with phosphorothioate linkage
  modified_base 15: mod_base = OTHER; note = 2'-O-methoxy-ethyl modified nucleotide with phosphorothioate linkage
  modified_base 16: mod_base = OTHER; note = 2'-O-methoxy-ethyl modified nucleotide with phosphorothioate linkage
  modified_base 17: mod_base = OTHER; note = 2'-O-methoxy-ethyl modified nucleotide with phosphorothioate linkage
  modified_base 18: mod_base = OTHER; note = 2'-O-methoxy-ethyl modified nucleotide with phosphorothioate linkage
  modified_base 19: mod_base = OTHER; note = 2'-O-methoxy-ethyl modified nucleotide with phosphorothioate linkage
  modified_base 20: mod_base = OTHER; note = 2'-O-methoxy-ethyl modified nucleotide
aaacgtacagaaatgggagg

SEQ ID NO: 488 - RNA, 20 nt, synthetic construct
  source 1..20: mol_type = other RNA
  modified_base 1: mod_base = OTHER; note = Locked nucleotide with phosphorothioate linkage
  modified_base 2: mod_base = OTHER; note = 2'-O-methoxy-ethyl modified nucleotide with phosphorothioate linkage
  modified_base 3: mod_base = OTHER; note = 2'-O-methoxy-ethyl modified nucleotide with phosphorothioate linkage
  modified_base 4: mod_base = OTHER; note = 2'-O-methoxy-ethyl modified nucleotide with phosphorothioate linkage
  modified_base 5: mod_base = OTHER; note = 2'-O-methoxy-ethyl modified nucleotide with phosphorothioate linkage
  modified_base 6: mod_base = OTHER; note = 2'-O-methoxy-ethyl modified thymine with phosphorothioate linkage
  modified_base 7: mod_base = OTHER; note = 2'-O-methoxy-ethyl modified nucleotide with phosphorothioate linkage
  modified_base 8: mod_base = OTHER; note = 2'-O-methoxy-ethyl modified nucleotide with phosphorothioate linkage
  modified_base 9: mod_base = OTHER; note = 2'-O-methoxy-ethyl modified nucleotide with phosphorothioate linkage
  modified_base 10: mod_base = OTHER; note = 2'-O-methoxy-ethyl modified nucleotide with phosphorothioate linkage
  modified_base 11: mod_base = OTHER; note = 2'-O-methoxy-ethyl modified nucleotide with phosphorothioate linkage
  modified_base 12: mod_base = OTHER; note = 2'-O-methoxy-ethyl modified nucleotide with phosphorothioate linkage
  modified_base 13: mod_base = OTHER; note = 2'-O-methoxy-ethyl modified nucleotide with phosphorothioate linkage
  modified_base 14: mod_base = OTHER; note = 2'-O-methoxy-ethyl modified thymine with phosphorothioate linkage
  modified_base 15: mod_base = OTHER; note = 2'-O-methoxy-ethyl modified nucleotide with phosphorothioate linkage
  modified_base 16: mod_base = OTHER; note = 2'-O-methoxy-ethyl modified nucleotide with phosphorothioate linkage
  modified_base 17: mod_base = OTHER; note = 2'-O-methoxy-ethyl modified nucleotide with phosphorothioate linkage
  modified_base 18: mod_base = OTHER; note = 2'-O-methoxy-ethyl modified nucleotide with phosphorothioate linkage
  modified_base 19: mod_base = OTHER; note = 2'-O-methoxy-ethyl modified nucleotide with phosphorothioate linkage
  modified_base 20: mod_base = OTHER; note = 2'-O-methoxy-ethyl modified nucleotide
aaacgtacagaaatgggagg

SEQ ID NO: 489 - RNA, 20 nt, synthetic construct
  source 1..20: mol_type = other RNA
  modified_base 1: mod_base = OTHER; note = 2'-O-methoxy-ethyl modified nucleotide with phosphorothioate linkage
  modified_base 2: mod_base = OTHER; note = Locked nucleotide with phosphorothioate linkage
  modified_base 3: mod_base = OTHER; note = 2'-O-methoxy-ethyl modified nucleotide with phosphorothioate linkage
  modified_base 4: mod_base = OTHER; note = 2'-O-methoxy-ethyl modified nucleotide with phosphorothioate linkage
  modified_base 5: mod_base = OTHER; note = 2'-O-methoxy-ethyl modified nucleotide with phosphorothioate linkage
  modified_base 6: mod_base = OTHER; note = 2'-O-methoxy-ethyl modified thymine with phosphorothioate linkage
  modified_base 7: mod_base = OTHER; note = 2'-O-methoxy-ethyl modified nucleotide with phosphorothioate linkage
  modified_base 8: mod_base = OTHER; note = 2'-O-methoxy-ethyl modified nucleotide with phosphorothioate linkage
  modified_base 9: mod_base = OTHER; note = 2'-O-methoxy-ethyl modified nucleotide with phosphorothioate linkage
  modified_base 10: mod_base = OTHER; note = 2'-O-methoxy-ethyl modified nucleotide with phosphorothioate linkage
  modified_base 11: mod_base = OTHER; note = 2'-O-methoxy-ethyl modified nucleotide with phosphorothioate linkage
  modified_base 12: mod_base = OTHER; note = 2'-O-methoxy-ethyl modified nucleotide with phosphorothioate linkage
  modified_base 13: mod_base = OTHER; note = 2'-O-methoxy-ethyl modified nucleotide with phosphorothioate linkage
  modified_base 14: mod_base = OTHER; note = 2'-O-methoxy-ethyl modified thymine with phosphorothioate linkage
  modified_base 15: mod_base = OTHER; note = 2'-O-methoxy-ethyl modified nucleotide with phosphorothioate linkage
  modified_base 16: mod_base = OTHER; note = 2'-O-methoxy-ethyl modified nucleotide with phosphorothioate linkage
  modified_base 17: mod_base = OTHER; note = 2'-O-methoxy-ethyl modified nucleotide with phosphorothioate linkage
  modified_base 18: mod_base = OTHER; note = 2'-O-methoxy-ethyl modified nucleotide with phosphorothioate linkage
  modified_base 19: mod_base = OTHER; note = 2'-O-methoxy-ethyl modified nucleotide with phosphorothioate linkage
  modified_base 20: mod_base = OTHER; note = 2'-O-methoxy-ethyl modified nucleotide
aaacgtacagaaatgggagg

SEQ ID NO: 490 - RNA, 20 nt, synthetic construct
  source 1..20: mol_type = other RNA
  modified_base 1: mod_base = OTHER; note = 2'-O-methoxy-ethyl modified nucleotide with phosphorothioate linkage
  modified_base 2: mod_base = OTHER; note = 2'-O-methoxy-ethyl modified nucleotide with phosphorothioate linkage
  modified_base 3: mod_base = OTHER; note = Locked nucleotide with phosphorothioate linkage
  modified_base 4: mod_base = OTHER; note = 2'-O-methoxy-ethyl modified nucleotide with phosphorothioate linkage
  modified_base 5: mod_base = OTHER; note = 2'-O-methoxy-ethyl modified nucleotide with phosphorothioate linkage
  modified_base 6: mod_base = OTHER; note = 2'-O-methoxy-ethyl modified thymine with phosphorothioate linkage
  modified_base 7: mod_base = OTHER; note = 2'-O-methoxy-ethyl modified nucleotide with phosphorothioate linkage
  modified_base 8: mod_base = OTHER; note = 2'-O-methoxy-ethyl modified nucleotide with phosphorothioate linkage
  modified_base 9: mod_base = OTHER; note = 2'-O-methoxy-ethyl modified nucleotide with phosphorothioate linkage
  modified_base 10: mod_base = OTHER; note = 2'-O-methoxy-ethyl modified nucleotide with phosphorothioate linkage
  modified_base 11: mod_base = OTHER; note = 2'-O-methoxy-ethyl modified nucleotide with phosphorothioate linkage
  modified_base 12: mod_base = OTHER; note = 2'-O-methoxy-ethyl modified nucleotide with phosphorothioate linkage
  modified_base 13: mod_base = OTHER; note = 2'-O-methoxy-ethyl modified nucleotide with phosphorothioate linkage
  modified_base 14: mod_base = OTHER; note = 2'-O-methoxy-ethyl modified thymine with phosphorothioate linkage
  modified_base 15: mod_base = OTHER; note = 2'-O-methoxy-ethyl modified nucleotide with phosphorothioate linkage
  modified_base 16: mod_base = OTHER; note = 2'-O-methoxy-ethyl modified nucleotide with phosphorothioate linkage
  modified_base 17: mod_base = OTHER; note = 2'-O-methoxy-ethyl modified nucleotide with phosphorothioate linkage
  modified_base 18: mod_base = OTHER; note = 2'-O-methoxy-ethyl modified nucleotide with phosphorothioate linkage
  modified_base 19: mod_base = OTHER; note = 2'-O-methoxy-ethyl modified nucleotide with phosphorothioate linkage
  modified_base 20: mod_base = OTHER; note = 2'-O-methoxy-ethyl modified nucleotide
aaacgtacagaaatgggagg

SEQ ID NO: 491 - RNA, 20 nt, synthetic construct
  source 1..20: mol_type = other RNA
  modified_base 1: mod_base = OTHER; note = 2'-O-methoxy-ethyl modified nucleotide with phosphorothioate linkage
  modified_base 2: mod_base = OTHER; note = 2'-O-methoxy-ethyl modified nucleotide with phosphorothioate linkage
  modified_base 3: mod_base = OTHER; note = 2'-O-methoxy-ethyl modified nucleotide with phosphorothioate linkage
  modified_base 4: mod_base = OTHER; note = Locked nucleotide with phosphorothioate linkage
  modified_base 5: mod_base = OTHER; note = 2'-O-methoxy-ethyl modified nucleotide with phosphorothioate linkage
  modified_base 6: mod_base = OTHER; note = 2'-O-methoxy-ethyl modified thymine with phosphorothioate linkage
  modified_base 7: mod_base = OTHER; note = 2'-O-methoxy-ethyl modified nucleotide with phosphorothioate linkage
  modified_base 8: mod_base = OTHER; note = 2'-O-methoxy-ethyl modified nucleotide with phosphorothioate linkage
  modified_base 9: mod_base = OTHER; note = 2'-O-methoxy-ethyl modified nucleotide with phosphorothioate linkage
  modified_base 10: mod_base = OTHER; note = 2'-O-methoxy-ethyl modified nucleotide with phosphorothioate linkage
  modified_base 11: mod_base = OTHER; note = 2'-O-methoxy-ethyl modified nucleotide with phosphorothioate linkage
  modified_base 12: mod_base = OTHER; note = 2'-O-methoxy-ethyl modified nucleotide with phosphorothioate linkage
  modified_base 13: mod_base = OTHER; note = 2'-O-methoxy-ethyl modified nucleotide with phosphorothioate linkage
  modified_base 14: mod_base = OTHER; note = 2'-O-methoxy-ethyl modified thymine with phosphorothioate linkage
  modified_base 15: mod_base = OTHER; note = 2'-O-methoxy-ethyl modified nucleotide with phosphorothioate linkage
  modified_base 16: mod_base = OTHER; note = 2'-O-methoxy-ethyl modified nucleotide with phosphorothioate linkage
  modified_base 17: mod_base = OTHER; note = 2'-O-methoxy-ethyl modified nucleotide with phosphorothioate linkage
  modified_base 18: mod_base = OTHER; note = 2'-O-methoxy-ethyl modified nucleotide with phosphorothioate linkage
  modified_base 19: mod_base = OTHER; note = 2'-O-methoxy-ethyl modified nucleotide with phosphorothioate linkage
  modified_base 20: mod_base = OTHER; note = 2'-O-methoxy-ethyl modified nucleotide
aaacgtacagaaatgggagg

SEQ ID NO: 492 - RNA, 20 nt, synthetic construct
  source 1..20: mol_type = other RNA
  modified_base 1: mod_base = OTHER; note = 2'-O-methoxy-ethyl modified nucleotide with phosphorothioate linkage
  modified_base 2: mod_base = OTHER; note = 2'-O-methoxy-ethyl modified nucleotide with phosphorothioate linkage
  modified_base 3: mod_base = OTHER; note = 2'-O-methoxy-ethyl modified nucleotide with phosphorothioate linkage
  modified_base 4: mod_base = OTHER; note = 2'-O-methoxy-ethyl modified nucleotide with phosphorothioate linkage
  modified_base 5: mod_base = OTHER; note = Locked nucleotide with phosphorothioate linkage
  modified_base 6: mod_base = OTHER; note = 2'-O-methoxy-ethyl modified thymine with phosphorothioate linkage
  modified_base 7: mod_base = OTHER; note = 2'-O-methoxy-ethyl modified nucleotide with phosphorothioate linkage
  modified_base 8: mod_base = OTHER; note = 2'-O-methoxy-ethyl modified nucleotide with phosphorothioate linkage
  modified_base 9: mod_base = OTHER; note = 2'-O-methoxy-ethyl modified nucleotide with phosphorothioate linkage
  modified_base 10: mod_base = OTHER; note = 2'-O-methoxy-ethyl modified nucleotide with phosphorothioate linkage
  modified_base 11: mod_base = OTHER; note = 2'-O-methoxy-ethyl modified nucleotide with phosphorothioate linkage
  modified_base 12: mod_base = OTHER; note = 2'-O-methoxy-ethyl modified nucleotide with phosphorothioate linkage
  modified_base 13: mod_base = OTHER; note = 2'-O-methoxy-ethyl modified nucleotide with phosphorothioate linkage
  modified_base 14: mod_base = OTHER; note = 2'-O-methoxy-ethyl modified thymine with phosphorothioate linkage
  modified_base 15: mod_base = OTHER; note = 2'-O-methoxy-ethyl modified nucleotide with phosphorothioate linkage
  modified_base 16: mod_base = OTHER; note = 2'-O-methoxy-ethyl modified nucleotide with phosphorothioate linkage
  modified_base 17: mod_base = OTHER; note = 2'-O-methoxy-ethyl modified nucleotide with phosphorothioate linkage
  modified_base 18: mod_base = OTHER; note = 2'-O-methoxy-ethyl modified nucleotide with phosphorothioate linkage
  modified_base 19: mod_base = OTHER; note = 2'-O-methoxy-ethyl modified nucleotide with phosphorothioate linkage
  modified_base 20: mod_base = OTHER; note = 2'-O-methoxy-ethyl modified nucleotide
aaacgtacagaaatgggagg

SEQ ID NO: 493 - RNA, 20 nt, synthetic construct
  source 1..20: mol_type = other RNA
  modified_base 1: mod_base = OTHER; note = 2'-O-methoxy-ethyl modified nucleotide with phosphorothioate linkage
  modified_base 2: mod_base = OTHER; note = 2'-O-methoxy-ethyl modified nucleotide with phosphorothioate linkage
  modified_base 3: mod_base = OTHER; note = 2'-O-methoxy-ethyl modified nucleotide with phosphorothioate linkage
  modified_base 4: mod_base = OTHER; note = 2'-O-methoxy-ethyl modified nucleotide with phosphorothioate linkage
  modified_base 5: mod_base = OTHER; note = 2'-O-methoxy-ethyl modified nucleotide with phosphorothioate linkage
  modified_base 6: mod_base = OTHER; note = Locked thymine with phosphorothioate linkage
  modified_base 7: mod_base = OTHER; note = 2'-O-methoxy-ethyl modified nucleotide with phosphorothioate linkage
  modified_base 8: mod_base = OTHER; note = 2'-O-methoxy-ethyl modified nucleotide with phosphorothioate linkage
  modified_base 9: mod_base = OTHER; note = 2'-O-methoxy-ethyl modified nucleotide with phosphorothioate linkage
  modified_base 10: mod_base = OTHER; note = 2'-O-methoxy-ethyl modified nucleotide with phosphorothioate linkage
  modified_base 11: mod_base = OTHER; note = 2'-O-methoxy-ethyl modified nucleotide with phosphorothioate linkage
  modified_base 12: mod_base = OTHER; note = 2'-O-methoxy-ethyl modified nucleotide with phosphorothioate linkage
  modified_base 13: mod_base = OTHER; note = 2'-O-methoxy-ethyl modified nucleotide with phosphorothioate linkage
  modified_base 14: mod_base = OTHER; note = 2'-O-methoxy-ethyl modified thymine with phosphorothioate linkage
  modified_base 15: mod_base = OTHER; note = 2'-O-methoxy-ethyl modified nucleotide with phosphorothioate linkage
  modified_base 16: mod_base = OTHER; note = 2'-O-methoxy-ethyl modified nucleotide with phosphorothioate linkage
  modified_base 17: mod_base = OTHER; note = 2'-O-methoxy-ethyl modified nucleotide with phosphorothioate linkage
  modified_base 18: mod_base = OTHER; note = 2'-O-methoxy-ethyl modified nucleotide with phosphorothioate linkage
  modified_base 19: mod_base = OTHER; note = 2'-O-methoxy-ethyl modified nucleotide with phosphorothioate linkage
  modified_base 20: mod_base = OTHER; note = 2'-O-methoxy-ethyl modified nucleotide
aaacgtacagaaatgggagg

SEQ ID NO: 494 - RNA, 20 nt, synthetic construct
  source 1..20: mol_type = other RNA
  modified_base 1: mod_base = OTHER; note = 2'-O-methoxy-ethyl modified nucleotide with phosphorothioate linkage
  modified_base 2: mod_base = OTHER; note = 2'-O-methoxy-ethyl modified nucleotide with phosphorothioate linkage
  modified_base 3: mod_base = OTHER; note = 2'-O-methoxy-ethyl modified nucleotide with phosphorothioate linkage
  modified_base 4: mod_base = OTHER; note = 2'-O-methoxy-ethyl modified nucleotide with phosphorothioate linkage
  modified_base 5: mod_base = OTHER; note = 2'-O-methoxy-ethyl modified nucleotide with phosphorothioate linkage
  modified_base 6: mod_base = OTHER; note = 2'-O-methoxy-ethyl modified thymine with phosphorothioate linkage
  modified_base 7: mod_base = OTHER; note = Locked nucleotide with phosphorothioate linkage
  modified_base 8: mod_base = OTHER; note = 2'-O-methoxy-ethyl modified nucleotide with phosphorothioate linkage
  modified_base 9: mod_base = OTHER; note = 2'-O-methoxy-ethyl modified nucleotide with phosphorothioate linkage
  modified_base 10: mod_base = OTHER; note = 2'-O-methoxy-ethyl modified nucleotide with phosphorothioate linkage
  modified_base 11: mod_base = OTHER; note = 2'-O-methoxy-ethyl modified nucleotide with phosphorothioate linkage
  modified_base 12: mod_base = OTHER; note = 2'-O-methoxy-ethyl modified nucleotide with phosphorothioate linkage
  modified_base 13: mod_base = OTHER; note = 2'-O-methoxy-ethyl modified nucleotide with phosphorothioate linkage
  modified_base 14: mod_base = OTHER; note = 2'-O-methoxy-ethyl modified thymine with phosphorothioate linkage
  modified_base 15: mod_base = OTHER; note = 2'-O-methoxy-ethyl modified nucleotide with phosphorothioate linkage
  modified_base 16: mod_base = OTHER; note = 2'-O-methoxy-ethyl modified nucleotide with phosphorothioate linkage
  modified_base 17: mod_base = OTHER; note = 2'-O-methoxy-ethyl modified nucleotide with phosphorothioate linkage
  modified_base 18: mod_base = OTHER; note = 2'-O-methoxy-ethyl modified nucleotide with phosphorothioate linkage
  modified_base 19: mod_base = OTHER; note = 2'-O-methoxy-ethyl modified nucleotide with phosphorothioate linkage
  modified_base 20: mod_base = OTHER; note = 2'-O-methoxy-ethyl modified nucleotide
aaacgtacagaaatgggagg

SEQ ID NO: 495 - RNA, 20 nt, synthetic construct
  source 1..20: mol_type = other RNA
  modified_base 1: mod_base = OTHER; note = 2'-O-methoxy-ethyl modified nucleotide with phosphorothioate linkage
  modified_base 2: mod_base = OTHER; note = 2'-O-methoxy-ethyl modified nucleotide with phosphorothioate linkage
  modified_base 3: mod_base = OTHER; note = 2'-O-methoxy-ethyl modified nucleotide with phosphorothioate linkage
  modified_base 4: mod_base = OTHER; note = 2'-O-methoxy-ethyl modified nucleotide with phosphorothioate linkage
  modified_base 5: mod_base = OTHER; note = 2'-O-methoxy-ethyl modified nucleotide with phosphorothioate linkage
  modified_base 6: mod_base = OTHER; note = 2'-O-methoxy-ethyl modified thymine with phosphorothioate linkage
  modified_base 7: mod_base = OTHER; note = 2'-O-methoxy-ethyl modified nucleotide with phosphorothioate linkage
  modified_base 8: mod_base = OTHER; note = Locked nucleotide with phosphorothioate linkage
  modified_base 9: mod_base = OTHER; note = 2'-O-methoxy-ethyl modified nucleotide with phosphorothioate linkage
  modified_base 10: mod_base = OTHER; note = 2'-O-methoxy-ethyl modified nucleotide with phosphorothioate linkage
  modified_base 11: mod_base = OTHER; note = 2'-O-methoxy-ethyl modified nucleotide with phosphorothioate linkage
  modified_base 12: mod_base = OTHER; note = 2'-O-methoxy-ethyl modified nucleotide with phosphorothioate linkage
  modified_base 13: mod_base = OTHER; note = 2'-O-methoxy-ethyl modified nucleotide with phosphorothioate linkage
  modified_base 14: mod_base = OTHER; note = 2'-O-methoxy-ethyl modified thymine with phosphorothioate linkage
  modified_base 15: mod_base = OTHER; note = 2'-O-methoxy-ethyl modified nucleotide with phosphorothioate linkage
  modified_base 16: mod_base = OTHER; note = 2'-O-methoxy-ethyl modified nucleotide with phosphorothioate linkage
  modified_base 17: mod_base = OTHER; note = 2'-O-methoxy-ethyl modified nucleotide with phosphorothioate linkage
  modified_base 18: mod_base = OTHER; note = 2'-O-methoxy-ethyl modified nucleotide with phosphorothioate linkage
  modified_base 19: mod_base = OTHER; note = 2'-O-methoxy-ethyl modified nucleotide with phosphorothioate linkage
  modified_base 20: mod_base = OTHER; note = 2'-O-methoxy-ethyl modified nucleotide
aaacgtacagaaatgggagg

SEQ ID NO: 496 - RNA, 20 nt, synthetic construct
  source 1..20: mol_type = other RNA
  modified_base 1: mod_base = OTHER; note = 2'-O-methoxy-ethyl modified nucleotide with phosphorothioate linkage
  modified_base 2: mod_base = OTHER; note = 2'-O-methoxy-ethyl modified nucleotide with phosphorothioate linkage
  modified_base 3: mod_base = OTHER; note = 2'-O-methoxy-ethyl modified nucleotide with phosphorothioate linkage
  modified_base 4: mod_base = OTHER; note = 2'-O-methoxy-ethyl modified nucleotide with phosphorothioate linkage
  modified_base 5: mod_base = OTHER; note = 2'-O-methoxy-ethyl modified nucleotide with phosphorothioate linkage
  modified_base 6: mod_base = OTHER; note = 2'-O-methoxy-ethyl modified thymine with phosphorothioate linkage
  modified_base 7: mod_base = OTHER; note = 2'-O-methoxy-ethyl modified nucleotide with phosphorothioate linkage
  modified_base 8: mod_base = OTHER; note = 2'-O-methoxy-ethyl modified nucleotide with phosphorothioate linkage
  modified_base 9: mod_base = OTHER; note = Locked nucleotide with phosphorothioate linkage
  modified_base 10: mod_base = OTHER; note = 2'-O-methoxy-ethyl modified nucleotide with phosphorothioate linkage
  modified_base 11: mod_base = OTHER; note = 2'-O-methoxy-ethyl modified nucleotide with phosphorothioate linkage
  modified_base 12: mod_base = OTHER; note = 2'-O-methoxy-ethyl modified nucleotide with phosphorothioate linkage
  modified_base 13: mod_base = OTHER; note = 2'-O-methoxy-ethyl modified nucleotide with phosphorothioate linkage
  modified_base 14: mod_base = OTHER; note = 2'-O-methoxy-ethyl modified thymine with phosphorothioate linkage
  modified_base 15: mod_base = OTHER; note = 2'-O-methoxy-ethyl modified nucleotide with phosphorothioate linkage
  modified_base 16: mod_base = OTHER; note = 2'-O-methoxy-ethyl modified nucleotide with phosphorothioate linkage
  modified_base 17: mod_base = OTHER; note = 2'-O-methoxy-ethyl modified nucleotide with phosphorothioate linkage
  modified_base 18: mod_base = OTHER; note = 2'-O-methoxy-ethyl modified nucleotide with phosphorothioate linkage
  modified_base 19: mod_base = OTHER; note = 2'-O-methoxy-ethyl modified nucleotide with phosphorothioate linkage
  modified_base 20: mod_base = OTHER; note = 2'-O-methoxy-ethyl modified nucleotide
aaacgtacagaaatgggagg

SEQ ID NO: 497 - RNA, 20 nt, synthetic construct
  source 1..20: mol_type = other RNA
  modified_base 1: mod_base = OTHER; note = 2'-O-methoxy-ethyl modified nucleotide with phosphorothioate linkage
  modified_base 2: mod_base = OTHER; note = 2'-O-methoxy-ethyl modified nucleotide with phosphorothioate linkage
  modified_base 3: mod_base = OTHER; note = 2'-O-methoxy-ethyl modified nucleotide with phosphorothioate linkage
  modified_base 4: mod_base = OTHER; note = 2'-O-methoxy-ethyl modified nucleotide with phosphorothioate linkage
  modified_base 5: mod_base = OTHER; note = 2'-O-methoxy-ethyl modified nucleotide with phosphorothioate linkage
  modified_base 6: mod_base = OTHER; note = 2'-O-methoxy-ethyl modified thymine with phosphorothioate linkage
  modified_base 7: mod_base = OTHER; note = 2'-O-methoxy-ethyl modified nucleotide with phosphorothioate linkage
  modified_base 8: mod_base = OTHER; note = 2'-O-methoxy-ethyl modified nucleotide with phosphorothioate linkage
  modified_base 9: mod_base = OTHER; note = 2'-O-methoxy-ethyl modified nucleotide with phosphorothioate linkage
  modified_base 10: mod_base = OTHER; note = Locked nucleotide with phosphorothioate linkage
  modified_base 11: mod_base = OTHER; note = 2'-O-methoxy-ethyl modified nucleotide with phosphorothioate linkage
  modified_base 12: mod_base = OTHER; note = 2'-O-methoxy-ethyl modified nucleotide with phosphorothioate linkage
  modified_base 13: mod_base = OTHER; note = 2'-O-methoxy-ethyl modified nucleotide with phosphorothioate linkage
  modified_base 14: mod_base = OTHER; note = 2'-O-methoxy-ethyl modified thymine with phosphorothioate linkage
  modified_base 15: mod_base = OTHER; note = 2'-O-methoxy-ethyl modified nucleotide with phosphorothioate linkage
  modified_base 16: mod_base = OTHER; note = 2'-O-methoxy-ethyl modified nucleotide with phosphorothioate linkage
  modified_base 17: mod_base = OTHER; note = 2'-O-methoxy-ethyl modified nucleotide with phosphorothioate linkage
  modified_base 18: mod_base = OTHER; note = 2'-O-methoxy-ethyl modified nucleotide with phosphorothioate linkage
  modified_base 19: mod_base = OTHER; note = 2'-O-methoxy-ethyl modified nucleotide with phosphorothioate linkage
  modified_base 20: mod_base = OTHER; note = 2'-O-methoxy-ethyl modified nucleotide
aaacgtacagaaatgggagg

SEQ ID NO: 498 - RNA, 20 nt, synthetic construct
  source 1..20: mol_type = other RNA
  modified_base 1: mod_base = OTHER; note = 2'-O-methoxy-ethyl modified nucleotide with phosphorothioate linkage
  modified_base 2: mod_base = OTHER; note = 2'-O-methoxy-ethyl modified nucleotide with phosphorothioate linkage
  modified_base 3: mod_base = OTHER; note = 2'-O-methoxy-ethyl modified nucleotide with phosphorothioate linkage
  modified_base 4: mod_base = OTHER; note = 2'-O-methoxy-ethyl modified nucleotide with phosphorothioate linkage
  modified_base 5: mod_base = OTHER; note = 2'-O-methoxy-ethyl modified nucleotide with phosphorothioate linkage
  modified_base 6: mod_base = OTHER; note = 2'-O-methoxy-ethyl modified thymine with phosphorothioate linkage
  modified_base 7: mod_base = OTHER; note = 2'-O-methoxy-ethyl modified nucleotide with phosphorothioate linkage
  modified_base 8: mod_base = OTHER; note = 2'-O-methoxy-ethyl modified nucleotide with phosphorothioate linkage
  modified_base 9: mod_base = OTHER; note = 2'-O-methoxy-ethyl modified nucleotide with phosphorothioate linkage
  modified_base 10: mod_base = OTHER; note = 2'-O-methoxy-ethyl modified nucleotide with phosphorothioate linkage
  modified_base 11: mod_base = OTHER; note = Locked nucleotide with phosphorothioate linkage
  modified_base 12: mod_base = OTHER; note = 2'-O-methoxy-ethyl modified nucleotide with phosphorothioate linkage
  modified_base 13: mod_base = OTHER; note = 2'-O-methoxy-ethyl modified nucleotide with phosphorothioate linkage
  modified_base 14: mod_base = OTHER; note = 2'-O-methoxy-ethyl modified thymine with phosphorothioate linkage
  modified_base 15: mod_base = OTHER; note = 2'-O-methoxy-ethyl modified nucleotide with phosphorothioate linkage
  modified_base 16: mod_base = OTHER; note = 2'-O-methoxy-ethyl modified nucleotide with phosphorothioate linkage
  modified_base 17: mod_base = OTHER; note = 2'-O-methoxy-ethyl modified nucleotide with phosphorothioate linkage
  modified_base 18: mod_base = OTHER; note = 2'-O-methoxy-ethyl modified nucleotide with phosphorothioate linkage
  modified_base 19: mod_base = OTHER; note = 2'-O-methoxy-ethyl modified nucleotide with phosphorothioate linkage
  modified_base 20: mod_base = OTHER; note = 2'-O-methoxy-ethyl modified nucleotide
aaacgtacagaaatgggagg

SEQ ID NO: 499 - RNA, 20 nt, synthetic construct
  source 1..20: mol_type = other RNA
  modified_base 1: mod_base = OTHER; note = 2'-O-methoxy-ethyl modified nucleotide with phosphorothioate linkage
  modified_base 2: mod_base = OTHER; note = 2'-O-methoxy-ethyl modified nucleotide with phosphorothioate linkage
  modified_base 3: mod_base = OTHER; note = 2'-O-methoxy-ethyl modified nucleotide with phosphorothioate linkage
  modified_base 4: mod_base = OTHER; note = 2'-O-methoxy-ethyl modified nucleotide with phosphorothioate linkage
  modified_base 5: mod_base = OTHER; note = 2'-O-methoxy-ethyl modified nucleotide with phosphorothioate linkage
  modified_base 6: mod_base = OTHER; note = 2'-O-methoxy-ethyl modified thymine with phosphorothioate linkage
  modified_base 7: mod_base = OTHER; note = 2'-O-methoxy-ethyl modified nucleotide with phosphorothioate linkage
  modified_base 8: mod_base = OTHER; note = 2'-O-methoxy-ethyl modified nucleotide with phosphorothioate linkage
  modified_base 9: mod_base = OTHER; note = 2'-O-methoxy-ethyl modified nucleotide with phosphorothioate linkage
  modified_base 10: mod_base = OTHER; note = 2'-O-methoxy-ethyl modified nucleotide with phosphorothioate linkage
  modified_base 11: mod_base = OTHER; note = 2'-O-methoxy-ethyl modified nucleotide with phosphorothioate linkage
  modified_base 12: mod_base = OTHER; note = Locked nucleotide with phosphorothioate linkage
  modified_base 13: mod_base = OTHER; note = 2'-O-methoxy-ethyl modified nucleotide with phosphorothioate linkage
  modified_base 14: mod_base = OTHER; note = 2'-O-methoxy-ethyl modified thymine with phosphorothioate linkage
  modified_base 15: mod_base = OTHER; note = 2'-O-methoxy-ethyl modified nucleotide with phosphorothioate linkage
  modified_base 16: mod_base = OTHER; note = 2'-O-methoxy-ethyl modified nucleotide with phosphorothioate linkage
  modified_base 17: mod_base = OTHER; note = 2'-O-methoxy-ethyl modified nucleotide with phosphorothioate linkage
  modified_base 18: mod_base = OTHER; note = 2'-O-methoxy-ethyl modified nucleotide with phosphorothioate linkage
  modified_base 19: mod_base = OTHER; note = 2'-O-methoxy-ethyl modified nucleotide with phosphorothioate linkage
  modified_base 20: mod_base = OTHER; note = 2'-O-methoxy-ethyl modified nucleotide
aaacgtacagaaatgggagg

SEQ ID NO: 500 - RNA, 20 nt, synthetic construct
  source 1..20: mol_type = other RNA
  modified_base 1: mod_base = OTHER; note = 2'-O-methoxy-ethyl modified nucleotide with phosphorothioate linkage
  modified_base 2: mod_base = OTHER; note = 2'-O-methoxy-ethyl modified nucleotide with phosphorothioate linkage
  modified_base 3: mod_base = OTHER; note = 2'-O-methoxy-ethyl modified nucleotide with phosphorothioate linkage
  modified_base 4: mod_base = OTHER; note = 2'-O-methoxy-ethyl modified nucleotide with phosphorothioate linkage
  modified_base 5: mod_base = OTHER; note = 2'-O-methoxy-ethyl modified nucleotide with phosphorothioate linkage
  modified_base 6: mod_base = OTHER; note = 2'-O-methoxy-ethyl modified thymine with phosphorothioate linkage
  modified_base 7: mod_base = OTHER; note = 2'-O-methoxy-ethyl modified nucleotide with phosphorothioate linkage
  modified_base 8: mod_base = OTHER; note = 2'-O-methoxy-ethyl modified nucleotide with phosphorothioate linkage
  modified_base 9: mod_base = OTHER; note = 2'-O-methoxy-ethyl modified nucleotide with phosphorothioate linkage
  modified_base 10: mod_base = OTHER; note = 2'-O-methoxy-ethyl modified nucleotide with phosphorothioate linkage
  modified_base 11: mod_base = OTHER; note = 2'-O-methoxy-ethyl modified nucleotide with phosphorothioate linkage
  modified_base 12: mod_base = OTHER; note = 2'-O-methoxy-ethyl modified nucleotide with phosphorothioate linkage
  modified_base 13: mod_base = OTHER; note = Locked nucleotide with phosphorothioate linkage
  modified_base 14: mod_base = OTHER; note = 2'-O-methoxy-ethyl modified thymine with phosphorothioate linkage
  modified_base 15: mod_base = OTHER; note = 2'-O-methoxy-ethyl modified nucleotide with phosphorothioate linkage
  modified_base 16: mod_base = OTHER; note = 2'-O-methoxy-ethyl modified nucleotide with phosphorothioate linkage
  modified_base 17: mod_base = OTHER; note = 2'-O-methoxy-ethyl modified nucleotide with phosphorothioate linkage
  modified_base 18: mod_base = OTHER; note = 2'-O-methoxy-ethyl modified nucleotide with phosphorothioate linkage
  modified_base 19: mod_base = OTHER; note = 2'-O-methoxy-ethyl modified nucleotide with phosphorothioate linkage
  modified_base 20: mod_base = OTHER; note = 2'-O-methoxy-ethyl modified nucleotide
aaacgtacagaaatgggagg

SEQ ID NO: 501 - RNA, 20 nt, synthetic construct
  source 1..20: mol_type = other RNA
  modified_base 1: mod_base = OTHER; note = 2'-O-methoxy-ethyl modified nucleotide with phosphorothioate linkage
  modified_base 2: mod_base = OTHER; note = 2'-O-methoxy-ethyl modified nucleotide with phosphorothioate linkage
  modified_base 3: mod_base = OTHER; note = 2'-O-methoxy-ethyl modified nucleotide with phosphorothioate linkage
  modified_base 4: mod_base = OTHER; note = 2'-O-methoxy-ethyl modified nucleotide with phosphorothioate linkage
  modified_base 5: mod_base = OTHER; note = 2'-O-methoxy-ethyl modified nucleotide with phosphorothioate linkage
  modified_base 6: mod_base = OTHER; note = 2'-O-methoxy-ethyl modified thymine with phosphorothioate linkage
  modified_base 7: mod_base = OTHER; note = 2'-O-methoxy-ethyl modified nucleotide with phosphorothioate linkage
  modified_base 8: mod_base = OTHER; note = 2'-O-methoxy-ethyl modified nucleotide with phosphorothioate linkage
  modified_base 9: mod_base = OTHER; note = 2'-O-methoxy-ethyl modified nucleotide with phosphorothioate linkage
  modified_base 10: mod_base = OTHER; note = 2'-O-methoxy-ethyl modified nucleotide with phosphorothioate linkage
  modified_base 11: mod_base = OTHER; note = 2'-O-methoxy-ethyl modified nucleotide with phosphorothioate linkage
  modified_base 12: mod_base = OTHER; note = 2'-O-methoxy-ethyl modified nucleotide with phosphorothioate linkage
  modified_base 13: mod_base = OTHER; note = 2'-O-methoxy-ethyl modified nucleotide with phosphorothioate linkage
  modified_base 14: mod_base = OTHER; note = Locked thymine with phosphorothioate linkage
  modified_base 15: mod_base = OTHER; note = 2'-O-methoxy-ethyl modified nucleotide with phosphorothioate linkage
  modified_base 16: mod_base = OTHER; note = 2'-O-methoxy-ethyl modified nucleotide with phosphorothioate linkage
  modified_base 17: mod_base = OTHER; note = 2'-O-methoxy-ethyl modified nucleotide with phosphorothioate linkage
  modified_base 18: mod_base = OTHER; note = 2'-O-methoxy-ethyl modified nucleotide with phosphorothioate linkage
  modified_base 19: mod_base = OTHER; note = 2'-O-methoxy-ethyl modified nucleotide with phosphorothioate linkage
  modified_base 20: mod_base = OTHER; note = 2'-O-methoxy-ethyl modified nucleotide
aaacgtacagaaatgggagg

SEQ ID NO: 502 - RNA, 20 nt, synthetic construct
  source 1..20: mol_type = other RNA
  modified_base 1: mod_base = OTHER; note = 2'-O-methoxy-ethyl modified nucleotide with phosphorothioate linkage
  modified_base 2: mod_base = OTHER; note = 2'-O-methoxy-ethyl modified nucleotide with phosphorothioate linkage
  modified_base 3: mod_base = OTHER; note = 2'-O-methoxy-ethyl modified nucleotide with phosphorothioate linkage
  modified_base 4: mod_base = OTHER; note = 2'-O-methoxy-ethyl modified nucleotide with phosphorothioate linkage
  modified_base 5: mod_base = OTHER; note = 2'-O-methoxy-ethyl modified nucleotide with phosphorothioate linkage
  modified_base 6: mod_base = OTHER; note = 2'-O-methoxy-ethyl modified thymine with phosphorothioate linkage
  modified_base 7: mod_base = OTHER; note = 2'-O-methoxy-ethyl modified nucleotide with phosphorothioate linkage
  modified_base 8: mod_base = OTHER; note = 2'-O-methoxy-ethyl modified nucleotide with phosphorothioate linkage
  modified_base 9: mod_base = OTHER; note = 2'-O-methoxy-ethyl modified nucleotide with phosphorothioate linkage
  modified_base 10: mod_base = OTHER; note = 2'-O-methoxy-ethyl modified nucleotide with phosphorothioate linkage
  modified_base 11: mod_base = OTHER; note = 2'-O-methoxy-ethyl modified nucleotide with phosphorothioate linkage
  modified_base 12: mod_base = OTHER; note = 2'-O-methoxy-ethyl modified nucleotide with phosphorothioate linkage
  modified_base 13: mod_base = OTHER; note = 2'-O-methoxy-ethyl modified nucleotide with phosphorothioate linkage
  modified_base 14: mod_base = OTHER; note = 2'-O-methoxy-ethyl modified thymine with phosphorothioate linkage
  modified_base 15: mod_base = OTHER; note = Locked nucleotide with phosphorothioate linkage
  modified_base 16: mod_base = OTHER; note = 2'-O-methoxy-ethyl modified nucleotide with phosphorothioate linkage
  modified_base 17: mod_base = OTHER; note = 2'-O-methoxy-ethyl modified nucleotide with phosphorothioate linkage
  modified_base 18: mod_base = OTHER; note = 2'-O-methoxy-ethyl modified nucleotide with phosphorothioate linkage
  modified_base 19: mod_base = OTHER; note = 2'-O-methoxy-ethyl modified nucleotide with phosphorothioate linkage
  modified_base 20: mod_base = OTHER; note = 2'-O-methoxy-ethyl modified nucleotide
aaacgtacagaaatgggagg

SEQ ID NO: 503 - RNA, 20 nt, synthetic construct
  source 1..20: mol_type = other RNA
  modified_base 1: mod_base = OTHER; note = 2'-O-methoxy-ethyl modified nucleotide with phosphorothioate linkage
  modified_base 2: mod_base = OTHER; note = 2'-O-methoxy-ethyl modified nucleotide with phosphorothioate linkage
  modified_base 3: mod_base = OTHER; note = 2'-O-methoxy-ethyl modified nucleotide with phosphorothioate linkage
  modified_base 4: mod_base = OTHER; note = 2'-O-methoxy-ethyl modified nucleotide with phosphorothioate linkage
  modified_base 5: mod_base = OTHER; note = 2'-O-methoxy-ethyl modified nucleotide with phosphorothioate linkage
  modified_base 6: mod_base = OTHER; note = 2'-O-methoxy-ethyl modified thymine with phosphorothioate linkage
  modified_base 7: mod_base = OTHER; note = 2'-O-methoxy-ethyl modified nucleotide with phosphorothioate linkage
  modified_base 8: mod_base = OTHER; note = 2'-O-methoxy-ethyl modified nucleotide with phosphorothioate linkage
  modified_base 9: mod_base = OTHER; note = 2'-O-methoxy-ethyl modified nucleotide with phosphorothioate linkage
  modified_base 10: mod_base = OTHER; note = 2'-O-methoxy-ethyl modified nucleotide with phosphorothioate linkage
  modified_base 11: mod_base = OTHER; note = 2'-O-methoxy-ethyl modified nucleotide with phosphorothioate linkage
  modified_base 12: mod_base = OTHER; note = 2'-O-methoxy-ethyl modified nucleotide with phosphorothioate linkage
  modified_base 13: mod_base = OTHER; note = 2'-O-methoxy-ethyl modified nucleotide with phosphorothioate linkage
  modified_base 14: mod_base = OTHER; note = 2'-O-methoxy-ethyl modified thymine with phosphorothioate linkage
  modified_base 15: mod_base = OTHER; note = 2'-O-methoxy-ethyl modified nucleotide with phosphorothioate linkage
  modified_base 16: mod_base = OTHER; note = Locked nucleotide with phosphorothioate linkage
  modified_base 17: mod_base = OTHER; note = 2'-O-methoxy-ethyl modified nucleotide with phosphorothioate linkage
  modified_base 18: mod_base = OTHER; note = 2'-O-methoxy-ethyl modified nucleotide with phosphorothioate linkage
  modified_base 19: mod_base = OTHER; note = 2'-O-methoxy-ethyl modified nucleotide with phosphorothioate linkage
  modified_base 20: mod_base = OTHER; note = 2'-O-methoxy-ethyl modified nucleotide
aaacgtacagaaatgggagg

SEQ ID NO: 504 - RNA, 20 nt, synthetic construct
  source 1..20: mol_type = other RNA
  modified_base 1: mod_base = OTHER; note = 2'-O-methoxy-ethyl modified nucleotide with phosphorothioate linkage
  modified_base 2: mod_base = OTHER; note = 2'-O-methoxy-ethyl modified nucleotide with phosphorothioate linkage
  modified_base 3: mod_base = OTHER; note = 2'-O-methoxy-ethyl modified nucleotide with phosphorothioate linkage
  modified_base 4: mod_base = OTHER; note = 2'-O-methoxy-ethyl modified nucleotide with phosphorothioate linkage
  modified_base 5: mod_base = OTHER; note = 2'-O-methoxy-ethyl modified nucleotide with phosphorothioate linkage
  modified_base 6: mod_base = OTHER; note = 2'-O-methoxy-ethyl modified thymine with phosphorothioate linkage
  modified_base 7: mod_base = OTHER; note = 2'-O-methoxy-ethyl modified nucleotide with phosphorothioate linkage
  modified_base 8: mod_base = OTHER; note = 2'-O-methoxy-ethyl modified nucleotide with phosphorothioate linkage
  modified_base 9: mod_base = OTHER; note = 2'-O-methoxy-ethyl modified nucleotide with phosphorothioate linkage
  modified_base 10: mod_base = OTHER; note = 2'-O-methoxy-ethyl modified nucleotide with phosphorothioate linkage
  modified_base 11: mod_base = OTHER; note = 2'-O-methoxy-ethyl modified nucleotide with phosphorothioate linkage
  modified_base 12: mod_base = OTHER; note = 2'-O-methoxy-ethyl modified nucleotide with phosphorothioate linkage
  modified_base 13: mod_base = OTHER; note = 2'-O-methoxy-ethyl modified nucleotide with phosphorothioate linkage
  modified_base 14: mod_base = OTHER; note = 2'-O-methoxy-ethyl modified thymine with phosphorothioate linkage
  modified_base 15: mod_base = OTHER; note = 2'-O-methoxy-ethyl modified nucleotide with phosphorothioate linkage
  modified_base 16: mod_base = OTHER; note = 2'-O-methoxy-ethyl modified nucleotide with phosphorothioate linkage
  modified_base 17: mod_base = OTHER; note = Locked nucleotide with phosphorothioate linkage
  modified_base 18: mod_base = OTHER; note = 2'-O-methoxy-ethyl modified nucleotide with phosphorothioate linkage
  modified_base 19: mod_base = OTHER; note = 2'-O-methoxy-ethyl modified nucleotide with phosphorothioate linkage
  modified_base 20: mod_base = OTHER; note = 2'-O-methoxy-ethyl modified nucleotide
aaacgtacagaaatgggagg

SEQ ID NO: 505 - RNA, 20 nt, synthetic construct
  source 1..20: mol_type = other RNA
  modified_base 1: mod_base = OTHER; note = 2'-O-methoxy-ethyl modified nucleotide with phosphorothioate linkage
  modified_base 2: mod_base = OTHER; note = 2'-O-methoxy-ethyl modified nucleotide with phosphorothioate linkage
  modified_base 3: mod_base = OTHER; note = 2'-O-methoxy-ethyl modified nucleotide with phosphorothioate linkage
  modified_base 4: mod_base = OTHER; note = 2'-O-methoxy-ethyl modified nucleotide with phosphorothioate linkage
  modified_base 5: mod_base = OTHER; note = 2'-O-methoxy-ethyl modified nucleotide with phosphorothioate linkage
  modified_base 6: mod_base = OTHER; note = 2'-O-methoxy-ethyl modified thymine with phosphorothioate linkage
  modified_base 7: mod_base = OTHER; note = 2'-O-methoxy-ethyl modified nucleotide with phosphorothioate linkage
  modified_base 8: mod_base = OTHER; note = 2'-O-methoxy-ethyl modified nucleotide with phosphorothioate linkage
  modified_base 9: mod_base = OTHER; note = 2'-O-methoxy-ethyl modified nucleotide with phosphorothioate linkage
  modified_base 10: mod_base = OTHER; note = 2'-O-methoxy-ethyl modified nucleotide with phosphorothioate linkage
  modified_base 11: mod_base = OTHER; note = 2'-O-methoxy-ethyl modified nucleotide with phosphorothioate linkage
  modified_base 12: mod_base = OTHER; note = 2'-O-methoxy-ethyl modified nucleotide with phosphorothioate linkage
  modified_base 13: mod_base = OTHER; note = 2'-O-methoxy-ethyl modified nucleotide with phosphorothioate linkage
  modified_base 14: mod_base = OTHER; note = 2'-O-methoxy-ethyl modified thymine with phosphorothioate linkage
  modified_base 15: mod_base = OTHER; note = 2'-O-methoxy-ethyl modified nucleotide with phosphorothioate linkage
  modified_base 16: mod_base = OTHER; note = 2'-O-methoxy-ethyl modified nucleotide with phosphorothioate linkage
  modified_base 17: mod_base = OTHER; note = 2'-O-methoxy-ethyl modified nucleotide with phosphorothioate linkage
  modified_base 18: mod_base = OTHER; note = Locked nucleotide with phosphorothioate linkage
  modified_base 19: mod_base = OTHER; note = 2'-O-methoxy-ethyl modified nucleotide with phosphorothioate linkage
  modified_base 20: mod_base = OTHER; note = 2'-O-methoxy-ethyl modified nucleotide
aaacgtacagaaatgggagg

SEQ ID NO: 506 - RNA, 20 nt, synthetic construct
  source 1..20: mol_type = other RNA
  modified_base 1: mod_base = OTHER; note = 2'-O-methoxy-ethyl modified nucleotide with phosphorothioate linkage
  modified_base 2: mod_base = OTHER; note = 2'-O-methoxy-ethyl modified nucleotide with phosphorothioate linkage
  modified_base 3: mod_base = OTHER; note = 2'-O-methoxy-ethyl modified nucleotide with phosphorothioate linkage
  modified_base 4: mod_base = OTHER; note = 2'-O-methoxy-ethyl modified nucleotide with phosphorothioate linkage
  modified_base 5: mod_base = OTHER; note = 2'-O-methoxy-ethyl modified nucleotide with phosphorothioate linkage
  modified_base 6: mod_base = OTHER; note = 2'-O-methoxy-ethyl modified thymine with phosphorothioate linkage
  modified_base 7: mod_base = OTHER; note = 2'-O-methoxy-ethyl modified nucleotide with phosphorothioate linkage
  modified_base 8: mod_base = OTHER; note = 2'-O-methoxy-ethyl modified nucleotide with phosphorothioate linkage
  modified_base 9: mod_base = OTHER; note = 2'-O-methoxy-ethyl modified nucleotide with phosphorothioate linkage
  modified_base 10: mod_base = OTHER; note = 2'-O-methoxy-ethyl modified nucleotide with phosphorothioate linkage
  modified_base 11: mod_base = OTHER; note = 2'-O-methoxy-ethyl modified nucleotide with phosphorothioate linkage
  modified_base 12: mod_base = OTHER; note = 2'-O-methoxy-ethyl modified nucleotide with phosphorothioate linkage
  modified_base 13: mod_base = OTHER; note = 2'-O-methoxy-ethyl modified nucleotide with phosphorothioate linkage
  modified_base 14: mod_base = OTHER; note = 2'-O-methoxy-ethyl modified thymine with phosphorothioate linkage
  modified_base 15: mod_base = OTHER; note = 2'-O-methoxy-ethyl modified nucleotide with phosphorothioate linkage
  modified_base 16: mod_base = OTHER; note = 2'-O-methoxy-ethyl modified nucleotide with phosphorothioate linkage
  modified_base 17: mod_base = OTHER; note = 2'-O-methoxy-ethyl modified nucleotide with phosphorothioate linkage
  modified_base 18: mod_base = OTHER; note = 2'-O-methoxy-ethyl modified nucleotide with phosphorothioate linkage
  modified_base 19: mod_base = OTHER; note = Locked nucleotide with phosphorothioate linkage
  modified_base 20: mod_base = OTHER; note = 2'-O-methoxy-ethyl modified nucleotide
aaacgtacagaaatgggagg

SEQ ID NO: 507 - RNA, 20 nt, synthetic construct
  source 1..20: mol_type = other RNA
  modified_base 1: mod_base = OTHER; note = 2'-O-methoxy-ethyl modified nucleotide with phosphorothioate linkage
  modified_base 2: mod_base = OTHER; note = 2'-O-methoxy-ethyl modified nucleotide with phosphorothioate linkage
  modified_base 3: mod_base = OTHER; note = 2'-O-methoxy-ethyl modified nucleotide with phosphorothioate linkage
  modified_base 4: mod_base = OTHER; note = 2'-O-methoxy-ethyl modified nucleotide with phosphorothioate linkage
  modified_base 5: mod_base = OTHER; note = 2'-O-methoxy-ethyl modified nucleotide with phosphorothioate linkage
  modified_base 6: mod_base = OTHER; note = 2'-O-methoxy-ethyl modified thymine with phosphorothioate linkage
  modified_base 7: mod_base = OTHER; note = 2'-O-methoxy-ethyl modified nucleotide with phosphorothioate linkage
  modified_base 8: mod_base = OTHER; note = 2'-O-methoxy-ethyl modified nucleotide with phosphorothioate linkage
  modified_base 9: mod_base = OTHER; note = 2'-O-methoxy-ethyl modified nucleotide with phosphorothioate linkage
  modified_base 10: mod_base = OTHER; note = 2'-O-methoxy-ethyl modified nucleotide with phosphorothioate linkage
  modified_base 11: mod_base = OTHER; note = 2'-O-methoxy-ethyl modified nucleotide with phosphorothioate linkage
  modified_base 12: mod_base = OTHER; note = 2'-O-methoxy-ethyl modified nucleotide with phosphorothioate linkage
  modified_base 13: mod_base = OTHER; note = 2'-O-methoxy-ethyl modified nucleotide with phosphorothioate linkage
  modified_base 14: mod_base = OTHER; note = 2'-O-methoxy-ethyl modified thymine with phosphorothioate linkage
  modified_base 15: mod_base = OTHER; note = 2'-O-methoxy-ethyl modified nucleotide with phosphorothioate linkage
  modified_base 16: mod_base = OTHER; note = 2'-O-methoxy-ethyl modified nucleotide with phosphorothioate linkage
  modified_base 17: mod_base = OTHER; note = 2'-O-methoxy-ethyl modified nucleotide with phosphorothioate linkage
  modified_base 18: mod_base = OTHER; note = 2'-O-methoxy-ethyl modified nucleotide with phosphorothioate linkage
  modified_base 19: mod_base = OTHER; note = 2'-O-methoxy-ethyl modified nucleotide with phosphorothioate linkage
  modified_base 20: mod_base = OTHER; note = Locked nucleotide
aaacgtacagaaatgggagg

SEQ ID NO: 508 - RNA, 20 nt, synthetic construct
  source 1..20: mol_type = other RNA
  modified_base 1: mod_base = OTHER; note = Locked nucleotide with phosphorothioate linkage
  modified_base 2: mod_base = OTHER; note = 2'-O-methoxy-ethyl modified nucleotide with phosphorothioate linkage
  modified_base 3: mod_base = OTHER; note = 2'-O-methoxy-ethyl modified nucleotide with phosphorothioate linkage
  modified_base 4: mod_base = OTHER; note = 2'-O-methoxy-ethyl modified nucleotide with phosphorothioate linkage
  modified_base 5: mod_base = OTHER; note = 2'-O-methoxy-ethyl modified nucleotide with phosphorothioate linkage
  modified_base 6: mod_base = OTHER; note = 2'-O-methoxy-ethyl modified thymine with phosphorothioate linkage
  modified_base 7: mod_base = OTHER; note = 2'-O-methoxy-ethyl modified nucleotide with phosphorothioate linkage
  modified_base 8: mod_base = OTHER; note = 2'-O-methoxy-ethyl modified nucleotide with phosphorothioate linkage
  modified_base 9: mod_base = OTHER; note = 2'-O-methoxy-ethyl modified nucleotide with phosphorothioate linkage
  modified_base 10: mod_base = OTHER; note = 2'-O-methoxy-ethyl modified nucleotide with phosphorothioate linkage
  modified_base 11: mod_base = OTHER; note = 2'-O-methoxy-ethyl modified nucleotide with phosphorothioate linkage
  modified_base 12: mod_base = OTHER; note = 2'-O-methoxy-ethyl modified nucleotide with phosphorothioate linkage
  modified_base 13: mod_base = OTHER; note = 2'-O-methoxy-ethyl modified nucleotide with phosphorothioate linkage
  modified_base 14: mod_base = OTHER; note = 2'-O-methoxy-ethyl modified thymine with phosphorothioate linkage
  modified_base 15: mod_base = OTHER; note = 2'-O-methoxy-ethyl modified nucleotide with phosphorothioate linkage
  modified_base 16: mod_base = OTHER; note = 2'-O-methoxy-ethyl modified nucleotide with phosphorothioate linkage
  modified_base 17: mod_base = OTHER; note = 2'-O-methoxy-ethyl modified nucleotide with phosphorothioate linkage
  modified_base 18: mod_base = OTHER; note = 2'-O-methoxy-ethyl modified nucleotide with phosphorothioate linkage
  modified_base 19: mod_base = OTHER; note = 2'-O-methoxy-ethyl modified nucleotide with phosphorothioate linkage
  modified_base 20: mod_base = OTHER; note = Locked nucleotide
aaacgtacagaaatgggagg

SEQ ID NO: 509 - RNA, 20 nt, synthetic construct
  source 1..20: mol_type = other RNA
  modified_base 1: mod_base = OTHER; note = 2'-O-methoxy-ethyl modified nucleotide with phosphorothioate linkage
  modified_base 2: mod_base = OTHER; note = Locked nucleotide with phosphorothioate linkage
  modified_base 3: mod_base = OTHER; note = 2'-O-methoxy-ethyl modified nucleotide with phosphorothioate linkage
  modified_base 4: mod_base = OTHER; note = 2'-O-methoxy-ethyl modified nucleotide with phosphorothioate linkage
  modified_base 5: mod_base = OTHER; note = 2'-O-methoxy-ethyl modified nucleotide with phosphorothioate linkage
  modified_base 6: mod_base = OTHER; note = 2'-O-methoxy-ethyl modified thymine with phosphorothioate linkage
  modified_base 7: mod_base = OTHER; note = 2'-O-methoxy-ethyl modified nucleotide with phosphorothioate linkage
  modified_base 8: mod_base = OTHER; note = 2'-O-methoxy-ethyl modified nucleotide with phosphorothioate linkage
  modified_base 9: mod_base = OTHER; note = 2'-O-methoxy-ethyl modified nucleotide with phosphorothioate linkage
  modified_base 10: mod_base = OTHER; note = 2'-O-methoxy-ethyl modified nucleotide with phosphorothioate linkage
  modified_base 11: mod_base = OTHER; note = 2'-O-methoxy-ethyl modified nucleotide with phosphorothioate linkage
  modified_base 12: mod_base = OTHER; note = 2'-O-methoxy-ethyl modified nucleotide with phosphorothioate linkage
  modified_base 13: mod_base = OTHER; note = 2'-O-methoxy-ethyl modified nucleotide with phosphorothioate linkage
  modified_base 14: mod_base = OTHER; note = 2'-O-methoxy-ethyl modified thymine with phosphorothioate linkage
  modified_base 15: mod_base = OTHER; note = 2'-O-methoxy-ethyl modified nucleotide with phosphorothioate linkage
  modified_base 16: mod_base = OTHER; note = 2'-O-methoxy-ethyl modified nucleotide with phosphorothioate linkage
  modified_base 17: mod_base = OTHER; note = 2'-O-methoxy-ethyl modified nucleotide with phosphorothioate linkage
  modified_base 18: mod_base = OTHER; note = 2'-O-methoxy-ethyl modified nucleotide with phosphorothioate linkage
  modified_base 19: mod_base = OTHER; note = Locked nucleotide with phosphorothioate linkage
  modified_base 20: mod_base = OTHER; note = 2'-O-methoxy-ethyl modified nucleotide
aaacgtacagaaatgggagg

SEQ ID NO: 510 - RNA, 20 nt, synthetic construct
  source 1..20: mol_type = other RNA
  modified_base 1: mod_base = OTHER; note = 2'-O-methoxy-ethyl modified nucleotide with phosphorothioate linkage
  modified_base 2: mod_base = OTHER; note = 2'-O-methoxy-ethyl modified nucleotide with phosphorothioate linkage
  modified_base 3: mod_base = OTHER; note = Locked nucleotide with phosphorothioate linkage
  modified_base 4: mod_base = OTHER; note = 2'-O-methoxy-ethyl modified nucleotide with phosphorothioate linkage
  modified_base 5: mod_base = OTHER; note = 2'-O-methoxy-ethyl modified nucleotide with phosphorothioate linkage
  modified_base 6: mod_base = OTHER; note = 2'-O-methoxy-ethyl modified thymine with phosphorothioate linkage
  modified_base 7: mod_base = OTHER; note = 2'-O-methoxy-ethyl modified nucleotide with phosphorothioate linkage
  modified_base 8: mod_base = OTHER; note = 2'-O-methoxy-ethyl modified nucleotide with phosphorothioate linkage
  modified_base 9: mod_base = OTHER; note = 2'-O-methoxy-ethyl modified nucleotide with phosphorothioate linkage
  modified_base 10: mod_base = OTHER; note = 2'-O-methoxy-ethyl modified nucleotide with phosphorothioate linkage
  modified_base 11: mod_base = OTHER; note = 2'-O-methoxy-ethyl modified nucleotide with phosphorothioate linkage
  modified_base 12: mod_base = OTHER; note = 2'-O-methoxy-ethyl modified nucleotide with phosphorothioate linkage
  modified_base 13: mod_base = OTHER; note = 2'-O-methoxy-ethyl modified nucleotide with phosphorothioate linkage
  modified_base 14: mod_base = OTHER; note = 2'-O-methoxy-ethyl modified thymine with phosphorothioate linkage
  modified_base 15: mod_base = OTHER; note = 2'-O-methoxy-ethyl modified nucleotide with phosphorothioate linkage
  modified_base 16: mod_base = OTHER; note = 2'-O-methoxy-ethyl modified nucleotide with phosphorothioate linkage
  modified_base 17: mod_base = OTHER; note = 2'-O-methoxy-ethyl modified nucleotide with phosphorothioate linkage
  modified_base 18: mod_base = OTHER; note = Locked nucleotide with phosphorothioate linkage
  modified_base 19: mod_base = OTHER; note = 2'-O-methoxy-ethyl modified nucleotide with phosphorothioate linkage
  modified_base 20: mod_base = OTHER; note = 2'-O-methoxy-ethyl modified nucleotide
aaacgtacagaaatgggagg

SEQ ID NO: 511 - RNA, 20 nt, synthetic construct
  source 1..20: mol_type = other RNA
  modified_base 1: mod_base = OTHER; note = 2'-O-methoxy-ethyl modified nucleotide with phosphorothioate linkage
  modified_base 2: mod_base = OTHER; note = 2'-O-methoxy-ethyl modified nucleotide with phosphorothioate linkage
  modified_base 3: mod_base = OTHER; note = 2'-O-methoxy-ethyl modified nucleotide with phosphorothioate linkage
  modified_base 4: mod_base = OTHER; note = Locked nucleotide with phosphorothioate linkage
  modified_base 5: mod_base = OTHER; note = 2'-O-methoxy-ethyl modified nucleotide with phosphorothioate linkage
  modified_base 6: mod_base = OTHER; note = 2'-O-methoxy-ethyl modified thymine with phosphorothioate linkage
  modified_base 7: mod_base = OTHER; note = 2'-O-methoxy-ethyl modified nucleotide with phosphorothioate linkage
  modified_base 8: mod_base = OTHER; note = 2'-O-methoxy-ethyl modified nucleotide with phosphorothioate linkage
  modified_base 9: mod_base = OTHER; note = 2'-O-methoxy-ethyl modified nucleotide with phosphorothioate linkage
  modified_base 10: mod_base = OTHER; note = 2'-O-methoxy-ethyl modified nucleotide with phosphorothioate linkage
  modified_base 11: mod_base = OTHER; note = 2'-O-methoxy-ethyl modified nucleotide with phosphorothioate linkage
  modified_base 12: mod_base = OTHER; note = 2'-O-methoxy-ethyl modified nucleotide with phosphorothioate linkage
  modified_base 13: mod_base = OTHER; note = 2'-O-methoxy-ethyl modified nucleotide with phosphorothioate linkage
  modified_base 14: mod_base = OTHER; note = 2'-O-methoxy-ethyl modified thymine with phosphorothioate linkage
  modified_base 15: mod_base = OTHER; note = 2'-O-methoxy-ethyl modified nucleotide with phosphorothioate linkage
  modified_base 16: mod_base = OTHER; note = 2'-O-methoxy-ethyl modified nucleotide with phosphorothioate linkage
  modified_base 17: mod_base = OTHER; note = Locked nucleotide with phosphorothioate linkage
  modified_base 18: mod_base = OTHER; note = 2'-O-methoxy-ethyl modified nucleotide with phosphorothioate linkage
  modified_base 19: mod_base = OTHER; note = 2'-O-methoxy-ethyl modified nucleotide with phosphorothioate linkage
  modified_base 20: mod_base = OTHER; note = 2'-O-methoxy-ethyl modified nucleotide
aaacgtacagaaatgggagg

SEQ ID NO: 512 - RNA, 20 nt, synthetic construct
  source 1..20: mol_type = other RNA
  modified_base 1: mod_base = OTHER; note = 2'-O-methoxy-ethyl modified nucleotide with phosphorothioate linkage
  modified_base 2: mod_base = OTHER; note = 2'-O-methoxy-ethyl modified nucleotide with phosphorothioate linkage
  modified_base 3: mod_base = OTHER; note = 2'-O-methoxy-ethyl modified nucleotide with phosphorothioate linkage
  modified_base 4: mod_base = OTHER; note = 2'-O-methoxy-ethyl modified nucleotide with phosphorothioate linkage
  modified_base 5: mod_base = OTHER; note = Locked nucleotide with phosphorothioate linkage
  modified_base 6: mod_base = OTHER; note = 2'-O-methoxy-ethyl modified thymine with phosphorothioate linkage
  modified_base 7: mod_base = OTHER; note = 2'-O-methoxy-ethyl modified nucleotide with phosphorothioate linkage
  modified_base 8: mod_base = OTHER; note = 2'-O-methoxy-ethyl modified nucleotide with phosphorothioate linkage
  modified_base 9: mod_base = OTHER; note = 2'-O-methoxy-ethyl modified nucleotide with phosphorothioate linkage
  modified_base 10: mod_base = OTHER; note = 2'-O-methoxy-ethyl modified nucleotide with phosphorothioate linkage
  modified_base 11: mod_base = OTHER; note = 2'-O-methoxy-ethyl modified nucleotide with phosphorothioate linkage
  modified_base 12: mod_base = OTHER; note = 2'-O-methoxy-ethyl modified nucleotide with phosphorothioate linkage
  modified_base 13: mod_base = OTHER; note = 2'-O-methoxy-ethyl modified nucleotide with phosphorothioate linkage
  modified_base 14: mod_base = OTHER; note = 2'-O-methoxy-ethyl modified thymine with phosphorothioate linkage
  modified_base 15: mod_base = OTHER; note = 2'-O-methoxy-ethyl modified nucleotide with phosphorothioate linkage
  modified_base 16: mod_base = OTHER; note = Locked nucleotide with phosphorothioate linkage
  modified_base 17: mod_base = OTHER; note = 2'-O-methoxy-ethyl modified nucleotide with phosphorothioate linkage
  modified_base 18: mod_base = OTHER; note = 2'-O-methoxy-ethyl modified nucleotide with phosphorothioate linkage
  modified_base 19: mod_base = OTHER; note = 2'-O-methoxy-ethyl modified nucleotide with phosphorothioate linkage
  modified_base 20: mod_base = OTHER; note = 2'-O-methoxy-ethyl modified nucleotide
aaacgtacagaaatgggagg

SEQ ID NO: 513 - RNA, 20 nt, synthetic construct
  source 1..20: mol_type = other RNA
  modified_base 1: mod_base = OTHER; note = 2'-O-methoxy-ethyl modified nucleotide with phosphorothioate linkage
  modified_base 2: mod_base = OTHER; note = 2'-O-methoxy-ethyl modified nucleotide with phosphorothioate linkage
  modified_base 3: mod_base = OTHER; note = 2'-O-methoxy-ethyl modified nucleotide with phosphorothioate linkage
  modified_base 4: mod_base = OTHER; note = 2'-O-methoxy-ethyl modified nucleotide with phosphorothioate linkage
  modified_base 5: mod_base = OTHER; note = 2'-O-methoxy-ethyl modified nucleotide with phosphorothioate linkage
  modified_base 6: mod_base = OTHER; note = Locked thymine with phosphorothioate linkage
  modified_base 7: mod_base = OTHER; note = 2'-O-methoxy-ethyl modified nucleotide with phosphorothioate linkage
  modified_base 8: mod_base = OTHER; note = 2'-O-methoxy-ethyl modified nucleotide with phosphorothioate linkage
  modified_base 9: mod_base = OTHER; note = 2'-O-methoxy-ethyl modified nucleotide with phosphorothioate linkage
  modified_base 10: mod_base = OTHER; note = 2'-O-methoxy-ethyl modified nucleotide with phosphorothioate linkage
  modified_base 11: mod_base = OTHER; note = 2'-O-methoxy-ethyl modified nucleotide with phosphorothioate linkage
  modified_base 12: mod_base = OTHER; note = 2'-O-methoxy-ethyl modified nucleotide with phosphorothioate linkage
  modified_base 13: mod_base = OTHER; note = 2'-O-methoxy-ethyl modified nucleotide with phosphorothioate linkage
  modified_base 14: mod_base = OTHER; note = 2'-O-methoxy-ethyl modified thymine with phosphorothioate linkage
  modified_base 15: mod_base = OTHER; note = Locked nucleotide with phosphorothioate linkage
  modified_base 16: mod_base = OTHER; note = 2'-O-methoxy-ethyl modified nucleotide with phosphorothioate linkage
  modified_base 17: mod_base = OTHER; note = 2'-O-methoxy-ethyl modified nucleotide with phosphorothioate linkage
  modified_base 18: mod_base = OTHER; note = 2'-O-methoxy-ethyl modified nucleotide with phosphorothioate linkage
  modified_base 19: mod_base = OTHER; note = 2'-O-methoxy-ethyl modified nucleotide with phosphorothioate linkage
  modified_base 20: mod_base = OTHER; note = 2'-O-methoxy-ethyl modified nucleotide
aaacgtacagaaatgggagg

SEQ ID NO: 514 - RNA, 20 nt, synthetic construct
  source 1..20: mol_type = other RNA
  modified_base 1: mod_base = OTHER; note = 2'-O-methoxy-ethyl modified nucleotide with phosphorothioate linkage
  modified_base 2: mod_base = OTHER; note = 2'-O-methoxy-ethyl modified nucleotide with phosphorothioate linkage
  modified_base 3: mod_base = OTHER; note = 2'-O-methoxy-ethyl modified nucleotide with phosphorothioate linkage
  modified_base 4: mod_base = OTHER; note = 2'-O-methoxy-ethyl modified nucleotide with phosphorothioate linkage
  modified_base 5: mod_base = OTHER; note = 2'-O-methoxy-ethyl modified nucleotide with phosphorothioate linkage
  modified_base 6: mod_base = OTHER; note = 2'-O-methoxy-ethyl modified thymine with phosphorothioate linkage
  modified_base 7: mod_base = OTHER; note = Locked nucleotide with phosphorothioate linkage
  modified_base 8: mod_base = OTHER; note = 2'-O-methoxy-ethyl modified nucleotide with phosphorothioate linkage
  modified_base 9: mod_base = OTHER; note = 2'-O-methoxy-ethyl modified nucleotide with phosphorothioate linkage
  modified_base 10: mod_base = OTHER; note = 2'-O-methoxy-ethyl modified nucleotide with phosphorothioate linkage
  modified_base 11: mod_base = OTHER; note = 2'-O-methoxy-ethyl modified nucleotide with phosphorothioate linkage
  modified_base 12: mod_base = OTHER; note = 2'-O-methoxy-ethyl modified nucleotide with phosphorothioate linkage
  modified_base 13: mod_base = OTHER; note = 2'-O-methoxy-ethyl modified nucleotide with phosphorothioate linkage
  modified_base 14: mod_base = OTHER; note = Locked thymine with phosphorothioate linkage
  modified_base 15: mod_base = OTHER; note = 2'-O-methoxy-ethyl modified nucleotide with phosphorothioate linkage
  modified_base 16: mod_base = OTHER; note = 2'-O-methoxy-ethyl modified nucleotide with phosphorothioate linkage
  modified_base 17: mod_base = OTHER; note = 2'-O-methoxy-ethyl modified nucleotide with phosphorothioate linkage
  modified_base 18: mod_base = OTHER; note = 2'-O-methoxy-ethyl modified nucleotide with phosphorothioate linkage
  modified_base 19: mod_base = OTHER; note = 2'-O-methoxy-ethyl modified nucleotide with phosphorothioate linkage
  modified_base 20: mod_base = OTHER; note = 2'-O-methoxy-ethyl modified nucleotide
aaacgtacagaaatgggagg

SEQ ID NO: 515 - RNA, 20 nt, synthetic construct
  source 1..20: mol_type = other RNA
  modified_base 1: mod_base = OTHER; note = 2'-O-methoxy-ethyl modified nucleotide with phosphorothioate linkage
  modified_base 2: mod_base = OTHER; note = 2'-O-methoxy-ethyl modified nucleotide with phosphorothioate linkage
  modified_base 3: mod_base = OTHER; note = 2'-O-methoxy-ethyl modified nucleotide with phosphorothioate linkage
  modified_base 4: mod_base = OTHER; note = 2'-O-methoxy-ethyl modified nucleotide with phosphorothioate linkage
  modified_base 5: mod_base = OTHER; note = 2'-O-methoxy-ethyl modified nucleotide with phosphorothioate linkage
  modified_base 6: mod_base = OTHER; note = 2'-O-methoxy-ethyl modified thymine with phosphorothioate linkage
  modified_base 7: mod_base = OTHER; note = 2'-O-methoxy-ethyl modified nucleotide with phosphorothioate linkage
  modified_base 8: mod_base = OTHER; note = Locked nucleotide with phosphorothioate linkage
  modified_base 9: mod_base = OTHER; note = 2'-O-methoxy-ethyl modified nucleotide with phosphorothioate linkage
  modified_base 10: mod_base = OTHER; note = 2'-O-methoxy-ethyl modified nucleotide with phosphorothioate linkage
  modified_base 11: mod_base = OTHER; note = 2'-O-methoxy-ethyl modified nucleotide with phosphorothioate linkage
  modified_base 12: mod_base = OTHER; note = 2'-O-methoxy-ethyl modified nucleotide with phosphorothioate linkage
  modified_base 13: mod_base = OTHER; note = Locked nucleotide with phosphorothioate linkage
  modified_base 14: mod_base = OTHER; note = 2'-O-methoxy-ethyl modified thymine with phosphorothioate linkage
  modified_base 15: mod_base = OTHER; note = 2'-O-methoxy-ethyl modified nucleotide with phosphorothioate linkage
  modified_base 16: mod_base = OTHER; note = 2'-O-methoxy-ethyl modified nucleotide with phosphorothioate linkage
  modified_base 17: mod_base = OTHER; note = 2'-O-methoxy-ethyl modified nucleotide with phosphorothioate linkage
  modified_base 18: mod_base = OTHER; note = 2'-O-methoxy-ethyl modified nucleotide with phosphorothioate linkage
  modified_base 19: mod_base = OTHER; note = 2'-O-methoxy-ethyl modified nucleotide with phosphorothioate linkage
  modified_base 20: mod_base = OTHER; note = 2'-O-methoxy-ethyl modified nucleotide
aaacgtacagaaatgggagg

SEQ ID NO: 516 - RNA, 20 nt, synthetic construct
  source 1..20: mol_type = other RNA
  modified_base 1: mod_base = OTHER; note = 2'-O-methoxy-ethyl modified nucleotide with phosphorothioate linkage
  modified_base 2: mod_base = OTHER; note = 2'-O-methoxy-ethyl modified nucleotide with phosphorothioate linkage
  modified_base 3: mod_base = OTHER; note = 2'-O-methoxy-ethyl modified nucleotide with phosphorothioate linkage
  modified_base 4: mod_base = OTHER; note = 2'-O-methoxy-ethyl modified nucleotide with phosphorothioate linkage
  modified_base 5: mod_base = OTHER; note = 2'-O-methoxy-ethyl modified nucleotide with phosphorothioate linkage
  modified_base 6: mod_base = OTHER; note = 2'-O-methoxy-ethyl modified thymine with phosphorothioate linkage
  modified_base 7: mod_base = OTHER; note = 2'-O-methoxy-ethyl modified nucleotide with phosphorothioate linkage
  modified_base 8: mod_base = OTHER; note = 2'-O-methoxy-ethyl modified nucleotide with phosphorothioate linkage
  modified_base 9: mod_base = OTHER; note = Locked nucleotide with phosphorothioate linkage
  modified_base 10: mod_base = OTHER; note = 2'-O-methoxy-ethyl modified nucleotide with phosphorothioate linkage
  modified_base 11: mod_base = OTHER; note = 2'-O-methoxy-ethyl modified nucleotide with phosphorothioate linkage
  modified_base 12: mod_base = OTHER; note = Locked nucleotide with phosphorothioate linkage
  modified_base 13: mod_base = OTHER; note = 2'-O-methoxy-ethyl modified nucleotide with phosphorothioate linkage
  modified_base 14: mod_base = OTHER; note = 2'-O-methoxy-ethyl modified thymine with phosphorothioate linkage
  modified_base 15: mod_base = OTHER; note = 2'-O-methoxy-ethyl modified nucleotide with phosphorothioate linkage
  modified_base 16: mod_base = OTHER; note = 2'-O-methoxy-ethyl modified nucleotide with phosphorothioate linkage
  modified_base 17: mod_base = OTHER; note = 2'-O-methoxy-ethyl modified nucleotide with phosphorothioate linkage
  modified_base 18: mod_base = OTHER; note = 2'-O-methoxy-ethyl modified nucleotide with phosphorothioate linkage
  modified_base 19: mod_base = OTHER; note = 2'-O-methoxy-ethyl modified nucleotide with phosphorothioate linkage
  modified_base 20: mod_base = OTHER; note = 2'-O-methoxy-ethyl modified nucleotide
aaacgtacagaaatgggagg

SEQ ID NO: 517 - RNA, 20 nt, synthetic construct
  source 1..20: mol_type = other RNA
  modified_base 1: mod_base = OTHER; note = 2'-O-methoxy-ethyl modified nucleotide with phosphorothioate linkage
  modified_base 2: mod_base = OTHER; note = 2'-O-methoxy-ethyl modified nucleotide with phosphorothioate linkage
  modified_base 3: mod_base = OTHER; note = 2'-O-methoxy-ethyl modified nucleotide with phosphorothioate linkage
  modified_base 4: mod_base = OTHER; note = 2'-O-methoxy-ethyl modified nucleotide with phosphorothioate linkage
  modified_base 5: mod_base = OTHER; note = 2'-O-methoxy-ethyl modified nucleotide with phosphorothioate linkage
  modified_base 6: mod_base = OTHER; note = 2'-O-methoxy-ethyl modified thymine with phosphorothioate linkage
  modified_base 7: mod_base = OTHER; note = 2'-O-methoxy-ethyl modified nucleotide with phosphorothioate linkage
  modified_base 8: mod_base = OTHER; note = 2'-O-methoxy-ethyl modified nucleotide with phosphorothioate linkage
  modified_base 9: mod_base = OTHER; note = 2'-O-methoxy-ethyl modified nucleotide with phosphorothioate linkage
  modified_base 10: mod_base = OTHER; note = Locked nucleotide with phosphorothioate linkage
  modified_base 11: mod_base = OTHER; note = Locked nucleotide with phosphorothioate linkage
  modified_base 12: mod_base = OTHER; note = 2'-O-methoxy-ethyl modified nucleotide with phosphorothioate linkage
  modified_base 13: mod_base = OTHER; note = 2'-O-methoxy-ethyl modified nucleotide with phosphorothioate linkage
  modified_base 14: mod_base = OTHER; note = 2'-O-methoxy-ethyl modified thymine with phosphorothioate linkage
  modified_base 15: mod_base = OTHER; note = 2'-O-methoxy-ethyl modified nucleotide with phosphorothioate linkage
  modified_base 16: mod_base = OTHER; note = 2'-O-methoxy-ethyl modified nucleotide with phosphorothioate linkage
  modified_base 17: mod_base = OTHER; note = 2'-O-methoxy-ethyl modified nucleotide with phosphorothioate linkage
  modified_base 18: mod_base = OTHER; note = 2'-O-methoxy-ethyl modified nucleotide with phosphorothioate linkage
  modified_base 19: mod_base = OTHER; note = 2'-O-methoxy-ethyl modified nucleotide with phosphorothioate linkage
  modified_base 20: mod_base = OTHER; note = 2'-O-methoxy-ethyl modified nucleotide
aaacgtacagaaatgggagg

SEQ ID NO: 518 - RNA, 20 nt, synthetic construct
  source 1..20: mol_type = other RNA
  modified_base 1: mod_base = OTHER; note = 2'-O-methoxy-ethyl modified nucleotide with phosphorothioate linkage
  modified_base 2: mod_base = OTHER; note = 2'-O-methoxy-ethyl modified nucleotide
  modified_base 3: mod_base = OTHER; note = 2'-O-methoxy-ethyl modified nucleotide with phosphorothioate linkage
  modified_base 4: mod_base = OTHER; note = 2'-O-methoxy-ethyl modified nucleotide with phosphorothioate linkage
  modified_base 5: mod_base = OTHER; note = 2'-O-methoxy-ethyl modified nucleotide with phosphorothioate linkage
  modified_base 6: mod_base = OTHER; note = 2'-O-methoxy-ethyl modified thymine with phosphorothioate linkage
  modified_base 7: mod_base = OTHER; note = 2'-O-methoxy-ethyl modified nucleotide with phosphorothioate linkage
  modified_base 8: mod_base = OTHER; note = 2'-O-methoxy-ethyl modified nucleotide with phosphorothioate linkage
  modified_base 9: mod_base = OTHER; note = 2'-O-methoxy-ethyl modified nucleotide with phosphorothioate linkage
  modified_base 10: mod_base = OTHER; note = 2'-O-methoxy-ethyl modified nucleotide with phosphorothioate linkage
  modified_base 11: mod_base = OTHER; note = 2'-O-methoxy-ethyl modified nucleotide with phosphorothioate linkage
  modified_base 12: mod_base = OTHER; note = 2'-O-methoxy-ethyl modified nucleotide with phosphorothioate linkage
  modified_base 13: mod_base = OTHER; note = 2'-O-methoxy-ethyl modified nucleotide with phosphorothioate linkage
  modified_base 14: mod_base = OTHER; note = 2'-O-methoxy-ethyl modified thymine with phosphorothioate linkage
  modified_base 15: mod_base = OTHER; note = 2'-O-methoxy-ethyl modified nucleotide with phosphorothioate linkage
  modified_base 16: mod_base = OTHER; note = 2'-O-methoxy-ethyl modified nucleotide with phosphorothioate linkage
  modified_base 17: mod_base = OTHER; note = 2'-O-methoxy-ethyl modified nucleotide with phosphorothioate linkage
  modified_base 18: mod_base = OTHER; note = 2'-O-methoxy-ethyl modified nucleotide with phosphorothioate linkage
  modified_base 19: mod_base = OTHER; note = 2'-O-methoxy-ethyl modified nucleotide with phosphorothioate linkage
  modified_base 20: mod_base = OTHER; note = 2'-O-methoxy-ethyl modified nucleotide
aaacgtacagaaatgggagg

SEQ ID NO: 519 - RNA, 20 nt, synthetic construct
  source 1..20: mol_type = other RNA
  modified_base 1: mod_base = OTHER; note = 2'-O-methoxy-ethyl modified nucleotide with phosphorothioate linkage
  modified_base 2: mod_base = OTHER; note = 2'-O-methoxy-ethyl modified nucleotide with phosphorothioate linkage
  modified_base 3: mod_base = OTHER; note = 2'-O-methoxy-ethyl modified nucleotide
  modified_base 4: mod_base = OTHER; note = 2'-O-methoxy-ethyl modified nucleotide with phosphorothioate linkage
  modified_base 5: mod_base = OTHER; note = 2'-O-methoxy-ethyl modified nucleotide with phosphorothioate linkage
  modified_base 6: mod_base = OTHER; note = 2'-O-methoxy-ethyl modified thymine with phosphorothioate linkage
  modified_base 7: mod_base = OTHER; note = 2'-O-methoxy-ethyl modified nucleotide with phosphorothioate linkage
  modified_base 8: mod_base = OTHER; note = 2'-O-methoxy-ethyl modified nucleotide with phosphorothioate linkage
  modified_base 9: mod_base = OTHER; note = 2'-O-methoxy-ethyl modified nucleotide with phosphorothioate linkage
  modified_base 10: mod_base = OTHER; note = 2'-O-methoxy-ethyl modified nucleotide with phosphorothioate linkage
  modified_base 11: mod_base = OTHER; note = 2'-O-methoxy-ethyl modified nucleotide with phosphorothioate linkage
  modified_base 12: mod_base = OTHER; note = 2'-O-methoxy-ethyl modified nucleotide with phosphorothioate linkage
  modified_base 13: mod_base = OTHER; note = 2'-O-methoxy-ethyl modified nucleotide with phosphorothioate linkage
  modified_base 14: mod_base = OTHER; note = 2'-O-methoxy-ethyl modified thymine with phosphorothioate linkage
  modified_base 15: mod_base = OTHER; note = 2'-O-methoxy-ethyl modified nucleotide with phosphorothioate linkage
  modified_base 16: mod_base = OTHER; note = 2'-O-methoxy-ethyl modified nucleotide with phosphorothioate linkage
  modified_base 17: mod_base = OTHER; note = 2'-O-methoxy-ethyl modified nucleotide with phosphorothioate linkage
  modified_base 18: mod_base = OTHER; note = 2'-O-methoxy-ethyl modified nucleotide with phosphorothioate linkage
  modified_base 19: mod_base = OTHER; note = 2'-O-methoxy-ethyl modified nucleotide with phosphorothioate linkage
  modified_base 20: mod_base = OTHER; note = 2'-O-methoxy-ethyl modified nucleotide
aaacgtacagaaatgggagg

SEQ ID NO: 520 - RNA, 20 nt, synthetic construct
  source 1..20: mol_type = other RNA
  modified_base 1: mod_base = OTHER; note = 2'-O-methoxy-ethyl modified nucleotide with phosphorothioate linkage
  modified_base 2: mod_base = OTHER; note = 2'-O-methoxy-ethyl modified nucleotide with phosphorothioate linkage
  modified_base 3: mod_base = OTHER; note = 2'-O-methoxy-ethyl modified nucleotide with phosphorothioate linkage
  modified_base 4: mod_base = OTHER; note = 2'-O-methoxy-ethyl modified nucleotide
  modified_base 5: mod_base = OTHER; note = 2'-O-methoxy-ethyl modified nucleotide with phosphorothioate linkage
  modified_base 6: mod_base = OTHER; note = 2'-O-methoxy-ethyl modified thymine with phosphorothioate linkage
  modified_base 7: mod_base = OTHER; note = 2'-O-methoxy-ethyl modified nucleotide with phosphorothioate linkage
  modified_base 8: mod_base = OTHER; note = 2'-O-methoxy-ethyl modified nucleotide with phosphorothioate linkage
  modified_base 9: mod_base = OTHER; note = 2'-O-methoxy-ethyl modified nucleotide with phosphorothioate linkage
  modified_base 10: mod_base = OTHER; note = 2'-O-methoxy-ethyl modified nucleotide with phosphorothioate linkage
  modified_base 11: mod_base = OTHER; note = 2'-O-methoxy-ethyl modified nucleotide with phosphorothioate linkage
  modified_base 12: mod_base = OTHER; note = 2'-O-methoxy-ethyl modified nucleotide with phosphorothioate linkage
  modified_base 13: mod_base = OTHER; note = 2'-O-methoxy-ethyl modified nucleotide with phosphorothioate linkage
  modified_base 14: mod_base = OTHER; note = 2'-O-methoxy-ethyl modified thymine with phosphorothioate linkage
  modified_base 15: mod_base = OTHER; note = 2'-O-methoxy-ethyl modified nucleotide with phosphorothioate linkage
  modified_base 16: mod_base = OTHER; note = 2'-O-methoxy-ethyl modified nucleotide with phosphorothioate linkage
  modified_base 17: mod_base = OTHER; note = 2'-O-methoxy-ethyl modified nucleotide with phosphorothioate linkage
  modified_base 18: mod_base = OTHER; note = 2'-O-methoxy-ethyl modified nucleotide with phosphorothioate linkage
  modified_base 19: mod_base = OTHER; note = 2'-O-methoxy-ethyl modified nucleotide with phosphorothioate linkage
  modified_base 20: mod_base = OTHER; note = 2'-O-methoxy-ethyl modified nucleotide
aaacgtacagaaatgggagg

SEQ ID NO: 521 - RNA, 20 nt, synthetic construct
  source 1..20: mol_type = other RNA
  modified_base 1: mod_base = OTHER; note = 2'-O-methoxy-ethyl modified nucleotide with phosphorothioate linkage
  modified_base 2: mod_base = OTHER; note = 2'-O-methoxy-ethyl modified nucleotide with phosphorothioate linkage
  modified_base 3: mod_base = OTHER; note = 2'-O-methoxy-ethyl modified nucleotide with phosphorothioate linkage
  modified_base 4: mod_base = OTHER; note = 2'-O-methoxy-ethyl modified nucleotide with phosphorothioate linkage
  modified_base 5: mod_base = OTHER; note = 2'-O-methoxy-ethyl modified nucleotide
  modified_base 6: mod_base = OTHER; note = 2'-O-methoxy-ethyl modified thymine with phosphorothioate linkage
  modified_base 7: mod_base = OTHER; note = 2'-O-methoxy-ethyl modified nucleotide with phosphorothioate linkage
  modified_base 8: mod_base = OTHER; note = 2'-O-methoxy-ethyl modified nucleotide with phosphorothioate linkage
  modified_base 9: mod_base = OTHER; note = 2'-O-methoxy-ethyl modified nucleotide with phosphorothioate linkage
  modified_base 10: mod_base = OTHER; note = 2'-O-methoxy-ethyl modified nucleotide with phosphorothioate linkage
  modified_base 11: mod_base = OTHER; note = 2'-O-methoxy-ethyl modified nucleotide with phosphorothioate linkage
  modified_base 12: mod_base = OTHER; note = 2'-O-methoxy-ethyl modified nucleotide with phosphorothioate linkage
  modified_base 13: mod_base = OTHER; note = 2'-O-methoxy-ethyl modified nucleotide with phosphorothioate linkage
  modified_base 14: mod_base = OTHER; note = 2'-O-methoxy-ethyl modified thymine with phosphorothioate linkage
  modified_base 15: mod_base = OTHER; note = 2'-O-methoxy-ethyl modified nucleotide with phosphorothioate linkage
  modified_base 16: mod_base = OTHER; note = 2'-O-methoxy-ethyl modified nucleotide with phosphorothioate linkage
  modified_base 17: mod_base = OTHER; note = 2'-O-methoxy-ethyl modified nucleotide with phosphorothioate linkage
  modified_base 18: mod_base = OTHER; note = 2'-O-methoxy-ethyl modified nucleotide with phosphorothioate linkage
  modified_base 19: mod_base = OTHER; note = 2'-O-methoxy-ethyl modified nucleotide with phosphorothioate linkage
  modified_base 20: mod_base = OTHER; note = 2'-O-methoxy-ethyl modified nucleotide
aaacgtacagaaatgggagg

SEQ ID NO: 522 - RNA, 20 nt, synthetic construct
  source 1..20: mol_type = other RNA
  modified_base 1: mod_base = OTHER; note = 2'-O-methoxy-ethyl modified nucleotide with phosphorothioate linkage
  modified_base 2: mod_base = OTHER; note = 2'-O-methoxy-ethyl modified nucleotide with phosphorothioate linkage
  modified_base 3: mod_base = OTHER; note = 2'-O-methoxy-ethyl modified nucleotide with phosphorothioate linkage
  modified_base 4: mod_base = OTHER; note = 2'-O-methoxy-ethyl modified nucleotide with phosphorothioate linkage
  modified_base 5: mod_base = OTHER; note = 2'-O-methoxy-ethyl modified nucleotide with phosphorothioate linkage
  modified_base 6: mod_base = OTHER; note = 2'-O-methoxy-ethyl modified thymine
  modified_base 7: mod_base = OTHER; note = 2'-O-methoxy-ethyl modified nucleotide with phosphorothioate linkage
  modified_base 8: mod_base = OTHER; note = 2'-O-methoxy-ethyl modified nucleotide with phosphorothioate linkage
  modified_base 9: mod_base = OTHER; note = 2'-O-methoxy-ethyl modified nucleotide with phosphorothioate linkage
  modified_base 10: mod_base = OTHER; note = 2'-O-methoxy-ethyl modified nucleotide with phosphorothioate linkage
  modified_base 11: mod_base = OTHER; note = 2'-O-methoxy-ethyl modified nucleotide with phosphorothioate linkage
  modified_base 12: mod_base = OTHER; note = 2'-O-methoxy-ethyl modified nucleotide with phosphorothioate linkage
  modified_base 13: mod_base = OTHER; note = 2'-O-methoxy-ethyl modified nucleotide with phosphorothioate linkage
  modified_base 14: mod_base = OTHER; note = 2'-O-methoxy-ethyl modified thymine with phosphorothioate linkage
  modified_base 15: mod_base = OTHER; note = 2'-O-methoxy-ethyl modified nucleotide with phosphorothioate linkage
  modified_base 16: mod_base = OTHER; note = 2'-O-methoxy-ethyl modified nucleotide with phosphorothioate linkage
  modified_base 17: mod_base = OTHER; note = 2'-O-methoxy-ethyl modified nucleotide with phosphorothioate linkage
  modified_base 18: mod_base = OTHER; note = 2'-O-methoxy-ethyl modified nucleotide with phosphorothioate linkage
  modified_base 19: mod_base = OTHER; note = 2'-O-methoxy-ethyl modified nucleotide with phosphorothioate linkage
  modified_base 20: mod_base = OTHER; note = 2'-O-methoxy-ethyl modified nucleotide
aaacgtacagaaatgggagg

SEQ ID NO: 523 - RNA, 20 nt, synthetic construct
  source 1..20: mol_type = other RNA
  modified_base 1: mod_base = OTHER; note = 2'-O-methoxy-ethyl modified nucleotide with phosphorothioate linkage
  modified_base 2: mod_base = OTHER; note = 2'-O-methoxy-ethyl modified nucleotide with phosphorothioate linkage
  modified_base 3: mod_base = OTHER; note = 2'-O-methoxy-ethyl modified nucleotide with phosphorothioate linkage
  modified_base 4: mod_base = OTHER; note = 2'-O-methoxy-ethyl modified nucleotide with phosphorothioate linkage
  modified_base 5: mod_base = OTHER; note = 2'-O-methoxy-ethyl modified nucleotide with phosphorothioate linkage
  modified_base 6: mod_base = OTHER; note = 2'-O-methoxy-ethyl modified thymine with phosphorothioate linkage
  modified_base 7: mod_base = OTHER; note = 2'-O-methoxy-ethyl modified nucleotide
  modified_base 8: mod_base = OTHER; note = 2'-O-methoxy-ethyl modified nucleotide with phosphorothioate linkage
  modified_base 9: mod_base = OTHER; note = 2'-O-methoxy-ethyl modified nucleotide with phosphorothioate linkage
  modified_base 10: mod_base = OTHER; note = 2'-O-methoxy-ethyl modified nucleotide with phosphorothioate linkage
  modified_base 11: mod_base = OTHER; note = 2'-O-methoxy-ethyl modified nucleotide with phosphorothioate linkage
  modified_base 12: mod_base = OTHER; note = 2'-O-methoxy-ethyl modified nucleotide with phosphorothioate linkage
  modified_base 13: mod_base = OTHER; note = 2'-O-methoxy-ethyl modified nucleotide with phosphorothioate linkage
  modified_base 14: mod_base = OTHER; note = 2'-O-methoxy-ethyl modified thymine with phosphorothioate linkage
  modified_base 15: mod_base = OTHER; note = 2'-O-methoxy-ethyl modified nucleotide with phosphorothioate linkage
  modified_base 16: mod_base = OTHER; note = 2'-O-methoxy-ethyl modified nucleotide with phosphorothioate linkage
  modified_base 17: mod_base = OTHER; note = 2'-O-methoxy-ethyl modified nucleotide with phosphorothioate linkage
  modified_base 18: mod_base = OTHER; note = 2'-O-methoxy-ethyl modified nucleotide with phosphorothioate linkage
  modified_base 19: mod_base = OTHER; note = 2'-O-methoxy-ethyl modified nucleotide with phosphorothioate linkage
  modified_base 20: mod_base = OTHER; note = 2'-O-methoxy-ethyl modified nucleotide
aaacgtacagaaatgggagg

SEQ ID NO: 524 - RNA, 20 nt, synthetic construct
  source 1..20: mol_type = other RNA
  modified_base 1: mod_base = OTHER; note = 2'-O-methoxy-ethyl modified nucleotide with phosphorothioate linkage
  modified_base 2: mod_base = OTHER; note = 2'-O-methoxy-ethyl modified nucleotide with phosphorothioate linkage
  modified_base 3: mod_base = OTHER; note = 2'-O-methoxy-ethyl modified nucleotide with phosphorothioate linkage
  modified_base 4: mod_base = OTHER; note = 2'-O-methoxy-ethyl modified nucleotide with phosphorothioate linkage
  modified_base 5: mod_base = OTHER; note = 2'-O-methoxy-ethyl modified nucleotide with phosphorothioate linkage
  modified_base 6: mod_base = OTHER; note = 2'-O-methoxy-ethyl modified thymine with phosphorothioate linkage
  modified_base 7: mod_base = OTHER; note = 2'-O-methoxy-ethyl modified nucleotide with phosphorothioate linkage
  modified_base 8: mod_base = OTHER; note = 2'-O-methoxy-ethyl modified nucleotide
  modified_base 9: mod_base = OTHER; note = 2'-O-methoxy-ethyl modified nucleotide with phosphorothioate linkage
  modified_base 10: mod_base = OTHER; note = 2'-O-methoxy-ethyl modified nucleotide with phosphorothioate linkage
  modified_base 11: mod_base = OTHER; note = 2'-O-methoxy-ethyl modified nucleotide with phosphorothioate linkage
  modified_base 12: mod_base = OTHER; note = 2'-O-methoxy-ethyl modified nucleotide with phosphorothioate linkage
  modified_base 13: mod_base = OTHER; note = 2'-O-methoxy-ethyl modified nucleotide with phosphorothioate linkage
  modified_base 14: mod_base = OTHER; note = 2'-O-methoxy-ethyl modified thymine with phosphorothioate linkage
  modified_base 15: mod_base = OTHER; note = 2'-O-methoxy-ethyl modified nucleotide with phosphorothioate linkage
  modified_base 16: mod_base = OTHER; note = 2'-O-methoxy-ethyl modified nucleotide with phosphorothioate linkage
  modified_base 17: mod_base = OTHER; note = 2'-O-methoxy-ethyl modified nucleotide with phosphorothioate linkage
  modified_base 18: mod_base = OTHER; note = 2'-O-methoxy-ethyl modified nucleotide with phosphorothioate linkage
  modified_base 19: mod_base = OTHER; note = 2'-O-methoxy-ethyl modified nucleotide with phosphorothioate linkage
  modified_base 20: mod_base = OTHER; note = 2'-O-methoxy-ethyl modified nucleotide
aaacgtacagaaatgggagg

SEQ ID NO: 525 - RNA, 20 nt, synthetic construct
  source 1..20: mol_type = other RNA
  modified_base 1: mod_base = OTHER; note = 2'-O-methoxy-ethyl modified nucleotide with phosphorothioate linkage
  modified_base 2: mod_base = OTHER; note = 2'-O-methoxy-ethyl modified nucleotide with phosphorothioate linkage
  modified_base 3: mod_base = OTHER; note = 2'-O-methoxy-ethyl modified nucleotide with phosphorothioate linkage
  modified_base 4: mod_base = OTHER; note = 2'-O-methoxy-ethyl modified nucleotide with phosphorothioate linkage
  modified_base 5: mod_base = OTHER; note = 2'-O-methoxy-ethyl modified nucleotide with phosphorothioate linkage
  modified_base 6: mod_base = OTHER; note = 2'-O-methoxy-ethyl modified thymine with phosphorothioate linkage
  modified_base 7: mod_base = OTHER; note = 2'-O-methoxy-ethyl modified nucleotide with phosphorothioate linkage
  modified_base 8: mod_base = OTHER; note = 2'-O-methoxy-ethyl modified nucleotide with phosphorothioate linkage
  modified_base 9: mod_base = OTHER; note = 2'-O-methoxy-ethyl modified nucleotide
  modified_base 10: mod_base = OTHER; note = 2'-O-methoxy-ethyl modified nucleotide with phosphorothioate linkage
  modified_base 11: mod_base = OTHER; note = 2'-O-methoxy-ethyl modified nucleotide with phosphorothioate linkage
  modified_base 12: mod_base = OTHER; note = 2'-O-methoxy-ethyl modified nucleotide with phosphorothioate linkage
  modified_base 13: mod_base = OTHER; note = 2'-O-methoxy-ethyl modified nucleotide with phosphorothioate linkage
  modified_base 14: mod_base = OTHER; note = 2'-O-methoxy-ethyl modified thymine with phosphorothioate linkage
  modified_base 15: mod_base = OTHER; note = 2'-O-methoxy-ethyl modified nucleotide with phosphorothioate linkage
  modified_base 16: mod_base = OTHER; note = 2'-O-methoxy-ethyl modified nucleotide with phosphorothioate linkage
  modified_base 17: mod_base = OTHER; note = 2'-O-methoxy-ethyl modified nucleotide with phosphorothioate linkage
  modified_base 18: mod_base = OTHER; note = 2'-O-methoxy-ethyl modified nucleotide with phosphorothioate linkage
  modified_base 19: mod_base = OTHER; note = 2'-O-methoxy-ethyl modified nucleotide with phosphorothioate linkage
  modified_base 20: mod_base = OTHER; note = 2'-O-methoxy-ethyl modified nucleotide
aaacgtacagaaatgggagg

SEQ ID NO: 526 - RNA, 20 nt, synthetic construct
  source 1..20: mol_type = other RNA
  modified_base 1: mod_base = OTHER; note = 2'-O-methoxy-ethyl modified nucleotide with phosphorothioate linkage
  modified_base 2: mod_base = OTHER; note = 2'-O-methoxy-ethyl modified nucleotide with phosphorothioate linkage
  modified_base 3: mod_base = OTHER; note = 2'-O-methoxy-ethyl modified nucleotide with phosphorothioate linkage
  modified_base 4: mod_base = OTHER; note = 2'-O-methoxy-ethyl modified nucleotide with phosphorothioate linkage
  modified_base 5: mod_base = OTHER; note = 2'-O-methoxy-ethyl modified nucleotide with phosphorothioate linkage
  modified_base 6: mod_base = OTHER; note = 2'-O-methoxy-ethyl modified thymine with phosphorothioate linkage
  modified_base 7: mod_base = OTHER; note = 2'-O-methoxy-ethyl modified nucleotide with phosphorothioate linkage
  modified_base 8: mod_base = OTHER; note = 2'-O-methoxy-ethyl modified nucleotide with phosphorothioate linkage
  modified_base 9: mod_base = OTHER; note = 2'-O-methoxy-ethyl modified nucleotide with phosphorothioate linkage
  modified_base 10: mod_base = OTHER; note = 2'-O-methoxy-ethyl modified nucleotide
  modified_base 11: mod_base = OTHER; note = 2'-O-methoxy-ethyl modified nucleotide with phosphorothioate linkage
  modified_base 12: mod_base = OTHER; note = 2'-O-methoxy-ethyl modified nucleotide with phosphorothioate linkage
  modified_base 13: mod_base = OTHER; note = 2'-O-methoxy-ethyl modified nucleotide with phosphorothioate linkage
  modified_base 14: mod_base = OTHER; note = 2'-O-methoxy-ethyl modified thymine with phosphorothioate linkage
  modified_base 15: mod_base = OTHER; note = 2'-O-methoxy-ethyl modified nucleotide with phosphorothioate linkage
  modified_base 16: mod_base = OTHER; note = 2'-O-methoxy-ethyl modified nucleotide with phosphorothioate linkage
  modified_base 17: mod_base = OTHER; note = 2'-O-methoxy-ethyl modified nucleotide with phosphorothioate linkage
  modified_base 18: mod_base = OTHER; note = 2'-O-methoxy-ethyl modified nucleotide with phosphorothioate linkage
  modified_base 19: mod_base = OTHER; note = 2'-O-methoxy-ethyl modified nucleotide with phosphorothioate linkage
  modified_base 20: mod_base = OTHER; note = 2'-O-methoxy-ethyl modified nucleotide
aaacgtacagaaatgggagg

SEQ ID NO: 527 - RNA, 20 nt, synthetic construct
  source 1..20: mol_type = other RNA
  modified_base 1: mod_base = OTHER; note = 2'-O-methoxy-ethyl modified nucleotide with phosphorothioate linkage
  modified_base 2: mod_base = OTHER; note = 2'-O-methoxy-ethyl modified nucleotide with phosphorothioate linkage
  modified_base 3: mod_base = OTHER; note = 2'-O-methoxy-ethyl modified nucleotide with phosphorothioate linkage
  modified_base 4: mod_base = OTHER; note = 2'-O-methoxy-ethyl modified nucleotide with phosphorothioate linkage
  modified_base 5: mod_base = OTHER; note = 2'-O-methoxy-ethyl modified nucleotide with phosphorothioate linkage
  modified_base 6: mod_base = OTHER; note = 2'-O-methoxy-ethyl modified thymine with phosphorothioate linkage
  modified_base 7: mod_base = OTHER; note = 2'-O-methoxy-ethyl modified nucleotide with phosphorothioate linkage
  modified_base 8: mod_base = OTHER; note = 2'-O-methoxy-ethyl modified nucleotide with phosphorothioate linkage
  modified_base 9: mod_base = OTHER; note = 2'-O-methoxy-ethyl modified nucleotide with phosphorothioate linkage
  modified_base 10: mod_base = OTHER; note = 2'-O-methoxy-ethyl modified nucleotide with phosphorothioate linkage
  modified_base 11: mod_base = OTHER; note = 2'-O-methoxy-ethyl modified nucleotide
  modified_base 12: mod_base = OTHER; note = 2'-O-methoxy-ethyl modified nucleotide with phosphorothioate linkage
  modified_base 13: mod_base = OTHER; note = 2'-O-methoxy-ethyl modified nucleotide with phosphorothioate linkage
  modified_base 14: mod_base = OTHER; note = 2'-O-methoxy-ethyl modified thymine with phosphorothioate linkage
  modified_base 15: mod_base = OTHER; note = 2'-O-methoxy-ethyl modified nucleotide with phosphorothioate linkage
  modified_base 16: mod_base = OTHER; note = 2'-O-methoxy-ethyl modified nucleotide with phosphorothioate linkage
  modified_base 17: mod_base = OTHER; note = 2'-O-methoxy-ethyl modified nucleotide with phosphorothioate linkage
  modified_base 18: mod_base = OTHER; note = 2'-O-methoxy-ethyl modified nucleotide with phosphorothioate linkage
  modified_base 19: mod_base = OTHER; note = 2'-O-methoxy-ethyl modified nucleotide with phosphorothioate linkage
  modified_base 20: mod_base = OTHER; note = 2'-O-methoxy-ethyl modified nucleotide
aaacgtacagaaatgggagg

SEQ ID NO: 528 - RNA, 20 nt, synthetic construct
  source 1..20: mol_type = other RNA
  modified_base 1: mod_base = OTHER; note = 2'-O-methoxy-ethyl modified nucleotide with phosphorothioate linkage
  modified_base 2: mod_base = OTHER; note = 2'-O-methoxy-ethyl modified nucleotide with phosphorothioate linkage
  modified_base 3: mod_base = OTHER; note = 2'-O-methoxy-ethyl modified nucleotide with phosphorothioate linkage
  modified_base 4: mod_base = OTHER; note = 2'-O-methoxy-ethyl modified nucleotide with phosphorothioate linkage
  modified_base 5: mod_base = OTHER; note = 2'-O-methoxy-ethyl modified nucleotide with phosphorothioate linkage
  modified_base 6: mod_base = OTHER; note = 2'-O-methoxy-ethyl modified thymine with phosphorothioate linkage
  modified_base 7: mod_base = OTHER; note = 2'-O-methoxy-ethyl modified nucleotide with phosphorothioate linkage
  modified_base 8: mod_base = OTHER; note = 2'-O-methoxy-ethyl modified nucleotide with phosphorothioate linkage
  modified_base 9: mod_base = OTHER; note = 2'-O-methoxy-ethyl modified nucleotide with phosphorothioate linkage
  modified_base 10: mod_base = OTHER; note = 2'-O-methoxy-ethyl modified nucleotide with phosphorothioate linkage
  modified_base 11: mod_base = OTHER; note = 2'-O-methoxy-ethyl modified nucleotide with phosphorothioate linkage
  modified_base 12: mod_base = OTHER; note = 2'-O-methoxy-ethyl modified nucleotide
  modified_base 13: mod_base = OTHER; note = 2'-O-methoxy-ethyl modified nucleotide with phosphorothioate linkage
  modified_base 14: mod_base = OTHER; note = 2'-O-methoxy-ethyl modified thymine with phosphorothioate linkage
  modified_base 15: mod_base = OTHER; note = 2'-O-methoxy-ethyl modified nucleotide with phosphorothioate linkage
  modified_base 16: mod_base = OTHER; note = 2'-O-methoxy-ethyl modified nucleotide with phosphorothioate linkage
  modified_base 17: mod_base = OTHER; note = 2'-O-methoxy-ethyl modified nucleotide with phosphorothioate linkage
  modified_base 18: mod_base = OTHER; note = 2'-O-methoxy-ethyl modified nucleotide with phosphorothioate linkage
  modified_base 19: mod_base = OTHER; note = 2'-O-methoxy-ethyl modified nucleotide with phosphorothioate linkage
  modified_base 20: mod_base = OTHER; note = 2'-O-methoxy-ethyl modified nucleotide
aaacgtacagaaatgggagg

SEQ ID NO: 529 - RNA, 20 nt, synthetic construct
  source 1..20: mol_type = other RNA
  modified_base 1: mod_base = OTHER; note = 2'-O-methoxy-ethyl modified nucleotide with phosphorothioate linkage
  modified_base 2: mod_base = OTHER; note = 2'-O-methoxy-ethyl modified nucleotide with phosphorothioate linkage
  modified_base 3: mod_base = OTHER; note = 2'-O-methoxy-ethyl modified nucleotide with phosphorothioate linkage
  modified_base 4: mod_base = OTHER; note = 2'-O-methoxy-ethyl modified nucleotide with phosphorothioate linkage
  modified_base 5: mod_base = OTHER; note = 2'-O-methoxy-ethyl modified nucleotide with phosphorothioate linkage
  modified_base 6: mod_base = OTHER; note = 2'-O-methoxy-ethyl modified thymine with phosphorothioate linkage
  modified_base 7: mod_base = OTHER; note = 2'-O-methoxy-ethyl modified nucleotide with phosphorothioate linkage
  modified_base 8: mod_base = OTHER; note = 2'-O-methoxy-ethyl modified nucleotide with phosphorothioate linkage
  modified_base 9: mod_base = OTHER; note = 2'-O-methoxy-ethyl modified nucleotide with phosphorothioate linkage
  modified_base 10: mod_base = OTHER; note = 2'-O-methoxy-ethyl modified nucleotide with phosphorothioate linkage
  modified_base 11: mod_base = OTHER; note = 2'-O-methoxy-ethyl modified nucleotide with phosphorothioate linkage
  modified_base 12: mod_base = OTHER; note = 2'-O-methoxy-ethyl modified nucleotide with phosphorothioate linkage
  modified_base 13: mod_base = OTHER; note = 2'-O-methoxy-ethyl modified nucleotide
  modified_base 14: mod_base = OTHER; note = 2'-O-methoxy-ethyl modified thymine with phosphorothioate linkage
  modified_base 15: mod_base = OTHER; note = 2'-O-methoxy-ethyl modified nucleotide with phosphorothioate linkage
  modified_base 16: mod_base = OTHER; note = 2'-O-methoxy-ethyl modified nucleotide with phosphorothioate linkage
  modified_base 17: mod_base = OTHER; note = 2'-O-methoxy-ethyl modified nucleotide with phosphorothioate linkage
  modified_base 18: mod_base = OTHER; note = 2'-O-methoxy-ethyl modified nucleotide with phosphorothioate linkage
  modified_base 19: mod_base = OTHER; note = 2'-O-methoxy-ethyl modified nucleotide with phosphorothioate linkage
  modified_base 20: mod_base = OTHER; note = 2'-O-methoxy-ethyl modified nucleotide
aaacgtacagaaatgggagg

SEQ ID NO: 530 - RNA, 20 nt, synthetic construct
  source 1..20: mol_type = other RNA
  modified_base 1: mod_base = OTHER; note = 2'-O-methoxy-ethyl modified nucleotide with phosphorothioate linkage
  modified_base 2: mod_base = OTHER; note = 2'-O-methoxy-ethyl modified nucleotide with phosphorothioate linkage
  modified_base 3: mod_base = OTHER; note = 2'-O-methoxy-ethyl modified nucleotide with phosphorothioate linkage
  modified_base 4: mod_base = OTHER; note = 2'-O-methoxy-ethyl modified nucleotide with phosphorothioate linkage
  modified_base 5: mod_base = OTHER; note = 2'-O-methoxy-ethyl modified nucleotide with phosphorothioate linkage
  modified_base 6: mod_base = OTHER; note = 2'-O-methoxy-ethyl modified thymine with phosphorothioate linkage
  modified_base 7: mod_base = OTHER; note = 2'-O-methoxy-ethyl modified nucleotide with phosphorothioate linkage
  modified_base 8: mod_base = OTHER; note = 2'-O-methoxy-ethyl modified nucleotide with phosphorothioate linkage
  modified_base 9: mod_base = OTHER; note = 2'-O-methoxy-ethyl modified nucleotide with phosphorothioate linkage
  modified_base 10: mod_base = OTHER; note = 2'-O-methoxy-ethyl modified nucleotide with phosphorothioate linkage
  modified_base 11: mod_base = OTHER; note = 2'-O-methoxy-ethyl modified nucleotide with phosphorothioate linkage
  modified_base 12: mod_base = OTHER; note = 2'-O-methoxy-ethyl modified nucleotide with phosphorothioate linkage
  modified_base 13: mod_base = OTHER; note = 2'-O-methoxy-ethyl modified nucleotide with phosphorothioate linkage
  modified_base 14: mod_base = OTHER; note = 2'-O-methoxy-ethyl modified thymine
  modified_base 15: mod_base = OTHER; note = 2'-O-methoxy-ethyl modified nucleotide with phosphorothioate linkage
  modified_base 16: mod_base = OTHER; note = 2'-O-methoxy-ethyl modified nucleotide with phosphorothioate linkage
  modified_base 17: mod_base = OTHER; note = 2'-O-methoxy-ethyl modified nucleotide with phosphorothioate linkage
  modified_base 18: mod_base = OTHER; note = 2'-O-methoxy-ethyl modified nucleotide with phosphorothioate linkage
  modified_base 19: mod_base = OTHER; note = 2'-O-methoxy-ethyl modified nucleotide with phosphorothioate linkage
  modified_base 20: mod_base = OTHER; note = 2'-O-methoxy-ethyl modified nucleotide
aaacgtacagaaatgggagg

SEQ ID NO: 531 - RNA, 20 nt, synthetic construct
  source 1..20: mol_type = other RNA
  modified_base 1: mod_base = OTHER; note = 2'-O-methoxy-ethyl modified nucleotide with phosphorothioate linkage
  modified_base 2: mod_base = OTHER; note = 2'-O-methoxy-ethyl modified nucleotide with phosphorothioate linkage
  modified_base 3: mod_base = OTHER; note = 2'-O-methoxy-ethyl modified nucleotide with phosphorothioate linkage
  modified_base 4: mod_base = OTHER; note = 2'-O-methoxy-ethyl modified nucleotide with phosphorothioate linkage
  modified_base 5: mod_base = OTHER; note = 2'-O-methoxy-ethyl modified nucleotide with phosphorothioate linkage
  modified_base 6: mod_base = OTHER; note = 2'-O-methoxy-ethyl modified thymine with phosphorothioate linkage
  modified_base 7: mod_base = OTHER; note = 2'-O-methoxy-ethyl modified nucleotide with phosphorothioate linkage
  modified_base 8: mod_base = OTHER; note = 2'-O-methoxy-ethyl modified nucleotide with phosphorothioate linkage
  modified_base 9: mod_base = OTHER; note = 2'-O-methoxy-ethyl modified nucleotide with phosphorothioate linkage
  modified_base 10: mod_base = OTHER; note = 2'-O-methoxy-ethyl modified nucleotide with phosphorothioate linkage
  modified_base 11: mod_base = OTHER; note = 2'-O-methoxy-ethyl modified nucleotide with phosphorothioate linkage
  modified_base 12: mod_base = OTHER; note = 2'-O-methoxy-ethyl modified nucleotide with phosphorothioate linkage
  modified_base 13: mod_base = OTHER; note = 2'-O-methoxy-ethyl modified nucleotide with phosphorothioate linkage
  modified_base 14: mod_base = OTHER; note = 2'-O-methoxy-ethyl modified thymine with phosphorothioate linkage
  modified_base 15: mod_base = OTHER; note = 2'-O-methoxy-ethyl modified nucleotide
  modified_base 16: mod_base = OTHER; note = 2'-O-methoxy-ethyl modified nucleotide with phosphorothioate linkage
  modified_base 17: mod_base = OTHER; note = 2'-O-methoxy-ethyl modified nucleotide with phosphorothioate linkage
  modified_base 18: mod_base = OTHER; note = 2'-O-methoxy-ethyl modified nucleotide with phosphorothioate linkage
  modified_base 19: mod_base = OTHER; note = 2'-O-methoxy-ethyl modified nucleotide with phosphorothioate linkage
  modified_base 20: mod_base = OTHER; note = 2'-O-methoxy-ethyl modified nucleotide
aaacgtacagaaatgggagg

SEQ ID NO: 532 - RNA, 20 nt, synthetic construct
  source 1..20: mol_type = other RNA
  modified_base 1: mod_base = OTHER; note = 2'-O-methoxy-ethyl modified nucleotide with phosphorothioate linkage
  modified_base 2: mod_base = OTHER; note = 2'-O-methoxy-ethyl modified nucleotide with phosphorothioate linkage
  modified_base 3: mod_base = OTHER; note = 2'-O-methoxy-ethyl modified nucleotide with phosphorothioate linkage
  modified_base 4: mod_base = OTHER; note = 2'-O-methoxy-ethyl modified nucleotide with phosphorothioate linkage
  modified_base 5: mod_base = OTHER; note = 2'-O-methoxy-ethyl modified nucleotide with phosphorothioate linkage
  modified_base 6: mod_base = OTHER; note = 2'-O-methoxy-ethyl modified thymine with phosphorothioate linkage
  modified_base 7: mod_base = OTHER; note = 2'-O-methoxy-ethyl modified nucleotide with phosphorothioate linkage
  modified_base 8: mod_base = OTHER; note = 2'-O-methoxy-ethyl modified nucleotide with phosphorothioate linkage
  modified_base 9: mod_base = OTHER; note = 2'-O-methoxy-ethyl modified nucleotide with phosphorothioate linkage
  modified_base 10: mod_base = OTHER; note = 2'-O-methoxy-ethyl modified nucleotide with phosphorothioate linkage
  modified_base 11: mod_base = OTHER; note = 2'-O-methoxy-ethyl modified nucleotide with phosphorothioate linkage
  modified_base 12: mod_base = OTHER; note = 2'-O-methoxy-ethyl modified nucleotide with phosphorothioate linkage
  modified_base 13: mod_base = OTHER; note = 2'-O-methoxy-ethyl modified nucleotide with phosphorothioate linkage
  modified_base 14: mod_base = OTHER; note = 2'-O-methoxy-ethyl modified thymine with phosphorothioate linkage
  modified_base 15: mod_base = OTHER; note = 2'-O-methoxy-ethyl modified nucleotide with phosphorothioate linkage
  modified_base 16: mod_base = OTHER; note = 2'-O-methoxy-ethyl modified nucleotide
  modified_base 17: mod_base = OTHER; note = 2'-O-methoxy-ethyl modified nucleotide with phosphorothioate linkage
  modified_base 18: mod_base = OTHER; note = 2'-O-methoxy-ethyl modified nucleotide with phosphorothioate linkage
  modified_base 19: mod_base = OTHER; note = 2'-O-methoxy-ethyl modified nucleotide with phosphorothioate linkage
  modified_base 20: mod_base = OTHER; note = 2'-O-methoxy-ethyl modified nucleotide
aaacgtacagaaatgggagg

SEQ ID NO: 533 - RNA, 20 nt, synthetic construct
  source 1..20: mol_type = other RNA
  modified_base 1: mod_base = OTHER; note = 2'-O-methoxy-ethyl modified nucleotide with phosphorothioate linkage
  modified_base 2: mod_base = OTHER; note = 2'-O-methoxy-ethyl modified nucleotide with phosphorothioate linkage
  modified_base 3: mod_base = OTHER; note = 2'-O-methoxy-ethyl modified nucleotide with phosphorothioate linkage
  modified_base 4: mod_base = OTHER; note = 2'-O-methoxy-ethyl modified nucleotide with phosphorothioate linkage
  modified_base 5: mod_base = OTHER; note = 2'-O-methoxy-ethyl modified nucleotide with phosphorothioate linkage
  modified_base 6: mod_base = OTHER; note = 2'-O-methoxy-ethyl modified thymine with phosphorothioate linkage
  modified_base 7: mod_base = OTHER; note = 2'-O-methoxy-ethyl modified nucleotide with phosphorothioate linkage
  modified_base 8: mod_base = OTHER; note = 2'-O-methoxy-ethyl modified nucleotide with phosphorothioate linkage
  modified_base 9: mod_base = OTHER; note = 2'-O-methoxy-ethyl modified nucleotide with phosphorothioate linkage
  modified_base 10: mod_base = OTHER; note = 2'-O-methoxy-ethyl modified nucleotide with phosphorothioate linkage
  modified_base 11: mod_base = OTHER; note = 2'-O-methoxy-ethyl modified nucleotide with phosphorothioate linkage
  modified_base 12: mod_base = OTHER; note = 2'-O-methoxy-ethyl modified nucleotide with phosphorothioate linkage
  modified_base 13: mod_base = OTHER; note = 2'-O-methoxy-ethyl modified nucleotide with phosphorothioate linkage
  modified_base 14: mod_base = OTHER; note = 2'-O-methoxy-ethyl modified thymine with phosphorothioate linkage
  modified_base 15: mod_base = OTHER; note = 2'-O-methoxy-ethyl modified nucleotide with phosphorothioate linkage
  modified_base 16: mod_base = OTHER; note = 2'-O-methoxy-ethyl modified nucleotide with phosphorothioate linkage
  modified_base 17: mod_base = OTHER; note = 2'-O-methoxy-ethyl modified nucleotide
  modified_base 18: mod_base = OTHER; note = 2'-O-methoxy-ethyl modified nucleotide with phosphorothioate linkage
  modified_base 19: mod_base = OTHER; note = 2'-O-methoxy-ethyl modified nucleotide with phosphorothioate linkage
  modified_base 20: mod_base = OTHER; note = 2'-O-methoxy-ethyl modified nucleotide
aaacgtacagaaatgggagg

SEQ ID NO: 534 - RNA, 20 nt, synthetic construct
  source 1..20: mol_type = other RNA
  modified_base 1: mod_base = OTHER; note = 2'-O-methoxy-ethyl modified nucleotide with phosphorothioate linkage
  modified_base 2: mod_base = OTHER; note = 2'-O-methoxy-ethyl modified nucleotide with phosphorothioate linkage
  modified_base 3: mod_base = OTHER; note = 2'-O-methoxy-ethyl modified nucleotide with phosphorothioate linkage
  modified_base 4: mod_base = OTHER; note = 2'-O-methoxy-ethyl modified nucleotide with phosphorothioate linkage
  modified_base 5: mod_base = OTHER; note = 2'-O-methoxy-ethyl modified nucleotide with phosphorothioate linkage
  modified_base 6: mod_base = OTHER; note = 2'-O-methoxy-ethyl modified thymine with phosphorothioate linkage
  modified_base 7: mod_base = OTHER; note = 2'-O-methoxy-ethyl modified nucleotide with phosphorothioate linkage
  modified_base 8: mod_base = OTHER; note = 2'-O-methoxy-ethyl modified nucleotide with phosphorothioate linkage
  modified_base 9: mod_base = OTHER; note = 2'-O-methoxy-ethyl modified nucleotide with phosphorothioate linkage
  modified_base 10: mod_base = OTHER; note = 2'-O-methoxy-ethyl modified nucleotide with phosphorothioate linkage
  modified_base 11: mod_base = OTHER; note = 2'-O-methoxy-ethyl modified nucleotide with phosphorothioate linkage
  modified_base 12: mod_base = OTHER; note = 2'-O-methoxy-ethyl modified nucleotide with phosphorothioate linkage
  modified_base 13: mod_base = OTHER; note = 2'-O-methoxy-ethyl modified nucleotide with phosphorothioate linkage
  modified_base 14: mod_base = OTHER; note = 2'-O-methoxy-ethyl modified thymine with phosphorothioate linkage
  modified_base 15: mod_base = OTHER; note = 2'-O-methoxy-ethyl modified nucleotide with phosphorothioate linkage
  modified_base 16: mod_base = OTHER; note = 2'-O-methoxy-ethyl modified nucleotide with phosphorothioate linkage
  modified_base 17: mod_base = OTHER; note = 2'-O-methoxy-ethyl modified nucleotide with phosphorothioate linkage
  modified_base 18: mod_base = OTHER; note = 2'-O-methoxy-ethyl modified nucleotide
  modified_base 19: mod_base = OTHER; note = 2'-O-methoxy-ethyl modified nucleotide with phosphorothioate linkage
  modified_base 20: mod_base = OTHER; note = 2'-O-methoxy-ethyl modified nucleotide
aaacgtacagaaatgggagg

SEQ ID NO: 535 - RNA, 20 nt, synthetic construct
  source 1..20: mol_type = other RNA
  modified_base 1: mod_base = OTHER; note = 2'-O-methoxy-ethyl modified nucleotide with phosphorothioate linkage
  modified_base 2: mod_base = OTHER; note = 2'-O-methoxy-ethyl modified nucleotide
  modified_base 3: mod_base = OTHER; note = 2'-O-methoxy-ethyl modified nucleotide with phosphorothioate linkage
  modified_base 4: mod_base = OTHER; note = 2'-O-methoxy-ethyl modified nucleotide with phosphorothioate linkage
  modified_base 5: mod_base = OTHER; note = 2'-O-methoxy-ethyl modified nucleotide with phosphorothioate linkage
  modified_base 6: mod_base = OTHER; note = 2'-O-methoxy-ethyl modified thymine with phosphorothioate linkage
  modified_base 7: mod_base = OTHER; note = 2'-O-methoxy-ethyl modified nucleotide with phosphorothioate linkage
  modified_base 8: mod_base = OTHER; note = 2'-O-methoxy-ethyl modified nucleotide with phosphorothioate linkage
  modified_base 9: mod_base = OTHER; note = 2'-O-methoxy-ethyl modified nucleotide with phosphorothioate linkage
  modified_base 10: mod_base = OTHER; note = 2'-O-methoxy-ethyl modified nucleotide with phosphorothioate linkage
  modified_base 11: mod_base = OTHER; note = 2'-O-methoxy-ethyl modified nucleotide with phosphorothioate linkage
  modified_base 12: mod_base = OTHER; note = 2'-O-methoxy-ethyl modified nucleotide with phosphorothioate linkage
  modified_base 13: mod_base = OTHER; note = 2'-O-methoxy-ethyl modified nucleotide with phosphorothioate linkage
  modified_base 14: mod_base = OTHER; note = 2'-O-methoxy-ethyl modified thymine with phosphorothioate linkage
  modified_base 15: mod_base = OTHER; note = 2'-O-methoxy-ethyl modified nucleotide with phosphorothioate linkage
  modified_base 16: mod_base = OTHER; note = 2'-O-methoxy-ethyl modified nucleotide with phosphorothioate linkage
  modified_base 17: mod_base = OTHER; note = 2'-O-methoxy-ethyl modified nucleotide with phosphorothioate linkage
  modified_base 18: mod_base = OTHER; note = 2'-O-methoxy-ethyl modified nucleotide
  modified_base 19: mod_base = OTHER; note = 2'-O-methoxy-ethyl modified nucleotide with phosphorothioate linkage
  modified_base 20: mod_base = OTHER; note = 2'-O-methoxy-ethyl modified nucleotide
aaacgtacagaaatgggagg

SEQ ID NO: 536 - RNA, 20 nt, synthetic construct
  source 1..20: mol_type = other RNA
  modified_base 1: mod_base = OTHER; note = 2'-O-methoxy-ethyl modified nucleotide with phosphorothioate linkage
  modified_base 2: mod_base = OTHER; note = 2'-O-methoxy-ethyl modified nucleotide with phosphorothioate linkage
  modified_base 3: mod_base = OTHER; note = 2'-O-methoxy-ethyl modified nucleotide
  modified_base 4: mod_base = OTHER; note = 2'-O-methoxy-ethyl modified nucleotide with phosphorothioate linkage
  modified_base 5: mod_base = OTHER; note = 2'-O-methoxy-ethyl modified nucleotide with phosphorothioate linkage
  modified_base 6: mod_base = OTHER; note = 2'-O-methoxy-ethyl modified thymine with phosphorothioate linkage
  modified_base 7: mod_base = OTHER; note = 2'-O-methoxy-ethyl modified nucleotide with phosphorothioate linkage
  modified_base 8: mod_base = OTHER; note = 2'-O-methoxy-ethyl modified nucleotide with phosphorothioate linkage
  modified_base 9: mod_base = OTHER; note = 2'-O-methoxy-ethyl modified nucleotide with phosphorothioate linkage
  modified_base 10: mod_base = OTHER; note = 2'-O-methoxy-ethyl modified nucleotide with phosphorothioate linkage
  modified_base 11: mod_base = OTHER; note = 2'-O-methoxy-ethyl modified nucleotide with phosphorothioate linkage
  modified_base 12: mod_base = OTHER; note = 2'-O-methoxy-ethyl modified nucleotide with phosphorothioate linkage
  modified_base 13: mod_base = OTHER; note = 2'-O-methoxy-ethyl modified nucleotide with phosphorothioate linkage
  modified_base 14: mod_base = OTHER; note = 2'-O-methoxy-ethyl modified thymine with phosphorothioate linkage
  modified_base 15: mod_base = OTHER; note = 2'-O-methoxy-ethyl modified nucleotide with phosphorothioate linkage
  modified_base 16: mod_base = OTHER; note = 2'-O-methoxy-ethyl modified nucleotide with phosphorothioate linkage
  modified_base 17: mod_base = OTHER; note = 2'-O-methoxy-ethyl modified nucleotide
  modified_base 18: mod_base = OTHER; note = 2'-O-methoxy-ethyl modified nucleotide with phosphorothioate linkage
  modified_base 19: mod_base = OTHER; note = 2'-O-methoxy-ethyl modified nucleotide with phosphorothioate linkage
  modified_base 20: mod_base = OTHER; note = 2'-O-methoxy-ethyl modified nucleotide
aaacgtacagaaatgggagg

SEQ ID NO: 537 - RNA, 20 nt, synthetic construct
  source 1..20: mol_type = other RNA
  modified_base 1: mod_base = OTHER; note = 2'-O-methoxy-ethyl modified nucleotide with phosphorothioate linkage
  modified_base 2: mod_base = OTHER; note = 2'-O-methoxy-ethyl modified nucleotide with phosphorothioate linkage
  modified_base 3: mod_base = OTHER; note = 2'-O-methoxy-ethyl modified nucleotide with phosphorothioate linkage
  modified_base 4: mod_base = OTHER; note = 2'-O-methoxy-ethyl modified nucleotide
  modified_base 5: mod_base = OTHER; note = 2'-O-methoxy-ethyl modified nucleotide with phosphorothioate linkage
  modified_base 6: mod_base = OTHER; note = 2'-O-methoxy-ethyl modified thymine with phosphorothioate linkage
  modified_base 7: mod_base = OTHER; note = 2'-O-methoxy-ethyl modified nucleotide with phosphorothioate linkage
  modified_base 8: mod_base = OTHER; note = 2'-O-methoxy-ethyl modified nucleotide with phosphorothioate linkage
  modified_base 9: mod_base = OTHER; note = 2'-O-methoxy-ethyl modified nucleotide with phosphorothioate linkage
  modified_base 10: mod_base = OTHER; note = 2'-O-methoxy-ethyl modified nucleotide with phosphorothioate linkage
  modified_base 11: mod_base = OTHER; note = 2'-O-methoxy-ethyl modified nucleotide with phosphorothioate linkage
  modified_base 12: mod_base = OTHER; note = 2'-O-methoxy-ethyl modified nucleotide with phosphorothioate linkage
  modified_base 13: mod_base = OTHER; note = 2'-O-methoxy-ethyl modified nucleotide with phosphorothioate linkage
  modified_base 14: mod_base = OTHER; note = 2'-O-methoxy-ethyl modified thymine with phosphorothioate linkage
  modified_base 15: mod_base = OTHER; note = 2'-O-methoxy-ethyl modified nucleotide with phosphorothioate linkage
  modified_base 16: mod_base = OTHER; note = 2'-O-methoxy-ethyl modified nucleotide
  modified_base 17: mod_base = OTHER; note = 2'-O-methoxy-ethyl modified nucleotide with phosphorothioate linkage
  modified_base 18: mod_base = OTHER; note = 2'-O-methoxy-ethyl modified nucleotide with phosphorothioate linkage
  modified_base 19: mod_base = OTHER; note = 2'-O-methoxy-ethyl modified nucleotide with phosphorothioate linkage
  modified_base 20: mod_base = OTHER; note = 2'-O-methoxy-ethyl modified nucleotide
aaacgtacagaaatgggagg

SEQ ID NO: 538 - RNA, 20 nt, synthetic construct
  source 1..20: mol_type = other RNA
  modified_base 1: mod_base = OTHER; note = 2'-O-methoxy-ethyl modified nucleotide with phosphorothioate linkage
  modified_base 2: mod_base = OTHER; note = 2'-O-methoxy-ethyl modified nucleotide with phosphorothioate linkage
  modified_base 3: mod_base = OTHER; note = 2'-O-methoxy-ethyl modified nucleotide with phosphorothioate linkage
  modified_base 4: mod_base = OTHER; note = 2'-O-methoxy-ethyl modified nucleotide with phosphorothioate linkage
  modified_base 5: mod_base = OTHER; note = 2'-O-methoxy-ethyl modified nucleotide
  modified_base 6: mod_base = OTHER; note = 2'-O-methoxy-ethyl modified thymine with phosphorothioate linkage
  modified_base 7: mod_base = OTHER; note = 2'-O-methoxy-ethyl modified nucleotide with phosphorothioate linkage
  modified_base 8: mod_base = OTHER; note = 2'-O-methoxy-ethyl modified nucleotide with phosphorothioate linkage
  modified_base 9: mod_base = OTHER; note = 2'-O-methoxy-ethyl modified nucleotide with phosphorothioate linkage
  modified_base 10: mod_base = OTHER; note = 2'-O-methoxy-ethyl modified nucleotide with phosphorothioate linkage
  modified_base 11: mod_base = OTHER; note = 2'-O-methoxy-ethyl modified nucleotide with phosphorothioate linkage
  modified_base 12: mod_base = OTHER; note = 2'-O-methoxy-ethyl modified nucleotide with phosphorothioate linkage
  modified_base 13: mod_base = OTHER; note = 2'-O-methoxy-ethyl modified nucleotide with phosphorothioate linkage
  modified_base 14: mod_base = OTHER; note = 2'-O-methoxy-ethyl modified thymine with phosphorothioate linkage
  modified_base 15: mod_base = OTHER; note = 2'-O-methoxy-ethyl modified nucleotide
  modified_base 16: mod_base = OTHER; note = 2'-O-methoxy-ethyl modified nucleotide with phosphorothioate linkage
  modified_base 17: mod_base = OTHER; note = 2'-O-methoxy-ethyl modified nucleotide with phosphorothioate linkage
  modified_base 18: mod_base = OTHER; note = 2'-O-methoxy-ethyl modified nucleotide with phosphorothioate linkage
  modified_base 19: mod_base = OTHER; note = 2'-O-methoxy-ethyl modified nucleotide with phosphorothioate linkage
  modified_base 20: mod_base = OTHER; note = 2'-O-methoxy-ethyl modified nucleotide
aaacgtacagaaatgggagg

SEQ ID NO: 539 - RNA, 20 nt, synthetic construct
  source 1..20: mol_type = other RNA
  modified_base 1: mod_base = OTHER; note = 2'-O-methoxy-ethyl modified nucleotide with phosphorothioate linkage
  modified_base 2: mod_base = OTHER; note = 2'-O-methoxy-ethyl modified nucleotide with phosphorothioate linkage
  modified_base 3: mod_base = OTHER; note = 2'-O-methoxy-ethyl modified nucleotide with phosphorothioate linkage
  modified_base 4: mod_base = OTHER; note = 2'-O-methoxy-ethyl modified nucleotide with phosphorothioate linkage
  modified_base 5: mod_base = OTHER; note = 2'-O-methoxy-ethyl modified nucleotide with phosphorothioate linkage
  modified_base 6: mod_base = OTHER; note = 2'-O-methoxy-ethyl modified thymine
  modified_base 7: mod_base = OTHER; note = 2'-O-methoxy-ethyl modified nucleotide with phosphorothioate linkage
  modified_base 8: mod_base = OTHER; note = 2'-O-methoxy-ethyl modified nucleotide with phosphorothioate linkage
  modified_base 9: mod_base = OTHER; note = 2'-O-methoxy-ethyl modified nucleotide with phosphorothioate linkage
  modified_base 10: mod_base = OTHER; note = 2'-O-methoxy-ethyl modified nucleotide with phosphorothioate linkage
  modified_base 11: mod_base = OTHER; note = 2'-O-methoxy-ethyl modified nucleotide with phosphorothioate linkage
  modified_base 12: mod_base = OTHER; note = 2'-O-methoxy-ethyl modified nucleotide with phosphorothioate linkage
  modified_base 13: mod_base = OTHER; note = 2'-O-methoxy-ethyl modified nucleotide with phosphorothioate linkage
  modified_base 14: mod_base = OTHER; note = 2'-O-methoxy-ethyl modified thymine
  modified_base 15: mod_base = OTHER; note = 2'-O-methoxy-ethyl modified nucleotide with phosphorothioate linkage
  modified_base 16: mod_base = OTHER; note = 2'-O-methoxy-ethyl modified nucleotide with phosphorothioate linkage
  modified_base 17: mod_base = OTHER; note = 2'-O-methoxy-ethyl modified nucleotide with phosphorothioate linkage
  modified_base 18: mod_base = OTHER; note = 2'-O-methoxy-ethyl modified nucleotide with phosphorothioate linkage
  modified_base 19: mod_base = OTHER; note = 2'-O-methoxy-ethyl modified nucleotide with phosphorothioate linkage
  modified_base 20: mod_base = OTHER; note = 2'-O-methoxy-ethyl modified nucleotide
aaacgtacagaaatgggagg

SEQ ID NO: 540 - RNA, 20 nt, synthetic construct
  source 1..20: mol_type = other RNA
  modified_base 1: mod_base = OTHER; note = 2'-O-methoxy-ethyl modified nucleotide with phosphorothioate linkage
  modified_base 2: mod_base = OTHER; note = 2'-O-methoxy-ethyl modified nucleotide with phosphorothioate linkage
  modified_base 3: mod_base = OTHER; note = 2'-O-methoxy-ethyl modified nucleotide with phosphorothioate linkage
  modified_base 4: mod_base = OTHER; note = 2'-O-methoxy-ethyl modified nucleotide with phosphorothioate linkage
  modified_base 5: mod_base = OTHER; note = 2'-O-methoxy-ethyl modified nucleotide with phosphorothioate linkage
  modified_base 6: mod_base = OTHER; note = 2'-O-methoxy-ethyl modified thymine with phosphorothioate linkage
  modified_base 7: mod_base = OTHER; note = 2'-O-methoxy-ethyl modified nucleotide
  modified_base 8: mod_base = OTHER; note = 2'-O-methoxy-ethyl modified nucleotide with phosphorothioate linkage
  modified_base 9: mod_base = OTHER; note = 2'-O-methoxy-ethyl modified nucleotide with phosphorothioate linkage
  modified_base 10: mod_base = OTHER; note = 2'-O-methoxy-ethyl modified nucleotide with phosphorothioate linkage
  modified_base 11: mod_base = OTHER; note = 2'-O-methoxy-ethyl modified nucleotide with phosphorothioate linkage
  modified_base 12: mod_base = OTHER; note = 2'-O-methoxy-ethyl modified nucleotide with phosphorothioate linkage
  modified_base 13: mod_base = OTHER; note = 2'-O-methoxy-ethyl modified nucleotide
  modified_base 14: mod_base = OTHER; note = 2'-O-methoxy-ethyl modified thymine with phosphorothioate linkage
  modified_base 15: mod_base = OTHER; note = 2'-O-methoxy-ethyl modified nucleotide with phosphorothioate linkage
  modified_base 16: mod_base = OTHER; note = 2'-O-methoxy-ethyl modified nucleotide with phosphorothioate linkage
  modified_base 17: mod_base = OTHER; note = 2'-O-methoxy-ethyl modified nucleotide with phosphorothioate linkage
  modified_base 18: mod_base = OTHER; note = 2'-O-methoxy-ethyl modified nucleotide with phosphorothioate linkage
  modified_base 19: mod_base = OTHER; note = 2'-O-methoxy-ethyl modified nucleotide with phosphorothioate linkage
  modified_base 20: mod_base = OTHER; note = 2'-O-methoxy-ethyl modified nucleotide
aaacgtacagaaatgggagg

SEQ ID NO: 541 - RNA, 20 nt, synthetic construct
  source 1..20: mol_type = other RNA
  modified_base 1: mod_base = OTHER; note = 2'-O-methoxy-ethyl modified nucleotide with phosphorothioate linkage
  modified_base 2: mod_base = OTHER; note = 2'-O-methoxy-ethyl modified nucleotide with phosphorothioate linkage
  modified_base 3: mod_base = OTHER; note = 2'-O-methoxy-ethyl modified nucleotide with phosphorothioate linkage
  modified_base 4: mod_base = OTHER; note = 2'-O-methoxy-ethyl modified nucleotide with phosphorothioate linkage
  modified_base 5: mod_base = OTHER; note = 2'-O-methoxy-ethyl modified nucleotide with phosphorothioate linkage
  modified_base 6: mod_base = OTHER; note = 2'-O-methoxy-ethyl modified thymine with phosphorothioate linkage
  modified_base 7: mod_base = OTHER; note = 2'-O-methoxy-ethyl modified nucleotide with phosphorothioate linkage
  modified_base 8: mod_base = OTHER; note = 2'-O-methoxy-ethyl modified nucleotide
  modified_base 9: mod_base = OTHER; note = 2'-O-methoxy-ethyl modified nucleotide with phosphorothioate linkage
  modified_base 10: mod_base = OTHER; note = 2'-O-methoxy-ethyl modified nucleotide with phosphorothioate linkage
  modified_base 11: mod_base = OTHER; note = 2'-O-methoxy-ethyl modified nucleotide with phosphorothioate linkage
  modified_base 12: mod_base = OTHER; note = 2'-O-methoxy-ethyl modified nucleotide
  modified_base 13: mod_base = OTHER; note = 2'-O-methoxy-ethyl modified nucleotide with phosphorothioate linkage
  modified_base 14: mod_base = OTHER; note = 2'-O-methoxy-ethyl modified thymine with phosphorothioate linkage
  modified_base 15: mod_base = OTHER; note = 2'-O-methoxy-ethyl modified nucleotide with phosphorothioate linkage
  modified_base 16: mod_base = OTHER; note = 2'-O-methoxy-ethyl modified nucleotide with phosphorothioate linkage
  modified_base 17: mod_base = OTHER; note = 2'-O-methoxy-ethyl modified nucleotide with phosphorothioate linkage
  modified_base 18: mod_base = OTHER; note = 2'-O-methoxy-ethyl modified nucleotide with phosphorothioate linkage
  modified_base 19: mod_base = OTHER; note = 2'-O-methoxy-ethyl modified nucleotide with phosphorothioate linkage
  modified_base 20: mod_base = OTHER; note = 2'-O-methoxy-ethyl modified nucleotide
aaacgtacagaaatgggagg

SEQ ID NO: 542 - RNA, 20 nt, synthetic construct
  source 1..20: mol_type = other RNA
  modified_base 1: mod_base = OTHER; note = 2'-O-methoxy-ethyl modified nucleotide with phosphorothioate linkage
  modified_base 2: mod_base = OTHER; note = 2'-O-methoxy-ethyl modified nucleotide with phosphorothioate linkage
  modified_base 3: mod_base = OTHER; note = 2'-O-methoxy-ethyl modified nucleotide with phosphorothioate linkage
  modified_base 4: mod_base = OTHER; note = 2'-O-methoxy-ethyl modified nucleotide with phosphorothioate linkage
  modified_base 5: mod_base = OTHER; note = 2'-O-methoxy-ethyl modified nucleotide with phosphorothioate linkage
  modified_base 6: mod_base = OTHER; note = 2'-O-methoxy-ethyl modified thymine with phosphorothioate linkage
  modified_base 7: mod_base = OTHER; note = 2'-O-methoxy-ethyl modified nucleotide with phosphorothioate linkage
  modified_base 8: mod_base = OTHER; note = 2'-O-methoxy-ethyl modified nucleotide with phosphorothioate linkage
  modified_base 9: mod_base = OTHER; note = 2'-O-methoxy-ethyl modified nucleotide
  modified_base 10: mod_base = OTHER; note = 2'-O-methoxy-ethyl modified nucleotide with phosphorothioate linkage
  modified_base 11: mod_base = OTHER; note = 2'-O-methoxy-ethyl modified nucleotide
  modified_base 12: mod_base = OTHER; note = 2'-O-methoxy-ethyl modified nucleotide with phosphorothioate linkage
  modified_base 13: mod_base = OTHER; note = 2'-O-methoxy-ethyl modified nucleotide with phosphorothioate linkage
  modified_base 14: mod_base = OTHER; note = 2'-O-methoxy-ethyl modified thymine with phosphorothioate linkage
  modified_base 15: mod_base = OTHER; note = 2'-O-methoxy-ethyl modified nucleotide with phosphorothioate linkage
  modified_base 16: mod_base = OTHER; note = 2'-O-methoxy-ethyl modified nucleotide with phosphorothioate linkage
  modified_base 17: mod_base = OTHER; note = 2'-O-methoxy-ethyl modified nucleotide with phosphorothioate linkage
  modified_base 18: mod_base = OTHER; note = 2'-O-methoxy-ethyl modified nucleotide with phosphorothioate linkage
  modified_base 19: mod_base = OTHER; note = 2'-O-methoxy-ethyl modified nucleotide with phosphorothioate linkage
  modified_base 20: mod_base = OTHER; note = 2'-O-methoxy-ethyl modified nucleotide
aaacgtacagaaatgggagg

SEQ ID NO: 543 - RNA, 20 nt, synthetic construct
  source 1..20: mol_type = other RNA
  modified_base 1: mod_base = OTHER; note = 2'-O-methoxy-ethyl modified nucleotide with phosphorothioate linkage
  modified_base 2: mod_base = OTHER; note = 2'-O-methoxy-ethyl modified nucleotide with phosphorothioate linkage
  modified_base 3: mod_base = OTHER; note = 2'-O-methoxy-ethyl modified nucleotide with phosphorothioate linkage
  modified_base 4: mod_base = OTHER; note = 2'-O-methoxy-ethyl modified nucleotide with phosphorothioate linkage
  modified_base 5: mod_base = OTHER; note = 2'-O-methoxy-ethyl modified nucleotide with phosphorothioate linkage
  modified_base 6: mod_base = OTHER; note = 2'-O-methoxy-ethyl modified thymine with phosphorothioate linkage
  modified_base 7: mod_base = OTHER; note = 2'-O-methoxy-ethyl modified nucleotide with phosphorothioate linkage
  modified_base 8: mod_base = OTHER; note = 2'-O-methoxy-ethyl modified nucleotide with phosphorothioate linkage
  modified_base 9: mod_base = OTHER; note = 2'-O-methoxy-ethyl modified nucleotide
  modified_base 10: mod_base = OTHER; note = 2'-O-methoxy-ethyl modified nucleotide
  modified_base 11: mod_base = OTHER; note = 2'-O-methoxy-ethyl modified nucleotide with phosphorothioate linkage
  modified_base 12: mod_base = OTHER; note = 2'-O-methoxy-ethyl modified nucleotide with phosphorothioate linkage
  modified_base 13: mod_base = OTHER; note = 2'-O-methoxy-ethyl modified nucleotide with phosphorothioate linkage
  modified_base 14: mod_base = OTHER; note = 2'-O-methoxy-ethyl modified thymine with phosphorothioate linkage
  modified_base 15: mod_base = OTHER; note = 2'-O-methoxy-ethyl modified nucleotide with phosphorothioate linkage
  modified_base 16: mod_base = OTHER; note = 2'-O-methoxy-ethyl modified nucleotide with phosphorothioate linkage
  modified_base 17: mod_base = OTHER; note = 2'-O-methoxy-ethyl modified nucleotide with phosphorothioate linkage
  modified_base 18: mod_base = OTHER; note = 2'-O-methoxy-ethyl modified nucleotide with phosphorothioate linkage
  modified_base 19: mod_base = OTHER; note = 2'-O-methoxy-ethyl modified nucleotide with phosphorothioate linkage
  modified_base 20: mod_base = OTHER; note = 2'-O-methoxy-ethyl modified nucleotide
aaacgtacagaaatgggagg

SEQ ID NO: 544 - RNA, 20 nt, synthetic construct
  source 1..20: mol_type = other RNA
  modified_base 1: mod_base = OTHER; note = 2'-O-methoxy-ethyl modified nucleotide with phosphorothioate linkage
  modified_base 2: mod_base = OTHER; note = 2'-O-methoxy-ethyl modified nucleotide with phosphorothioate linkage
  modified_base 3: mod_base = OTHER; note = 2'-O-methoxy-ethyl modified nucleotide with phosphorothioate linkage
  modified_base 4: mod_base = OTHER; note = 2'-O-methoxy-ethyl modified nucleotide with phosphorothioate linkage
  modified_base 5: mod_base = OTHER; note = 2'-O-methoxy-ethyl modified nucleotide with phosphorothioate linkage
  modified_base 6: mod_base = OTHER; note = 2'-O-methoxy-ethyl modified thymine with phosphorothioate linkage
  modified_base 7: mod_base = OTHER; note = 2'-O-methoxy-ethyl modified nucleotide with phosphorothioate linkage
  modified_base 8: mod_base = OTHER; note = 2'-O-methoxy-ethyl modified nucleotide with phosphorothioate linkage
  modified_base 9: mod_base = OTHER; note = 2'-O-methoxy-ethyl modified nucleotide with phosphorothioate linkage
  modified_base 10: mod_base = OTHER; note = 2'-O-methoxy-ethyl modified nucleotide
  modified_base 11: mod_base = OTHER; note = 2'-O-methoxy-ethyl modified nucleotide
  modified_base 12: mod_base = OTHER; note = 2'-O-methoxy-ethyl modified nucleotide with phosphorothioate linkage
  modified_base 13: mod_base = OTHER; note = 2'-O-methoxy-ethyl modified nucleotide with phosphorothioate linkage
  modified_base 14: mod_base = OTHER; note = 2'-O-methoxy-ethyl modified thymine with phosphorothioate linkage
  modified_base 15: mod_base = OTHER; note = 2'-O-methoxy-ethyl modified nucleotide with phosphorothioate linkage
  modified_base 16: mod_base = OTHER; note = 2'-O-methoxy-ethyl modified nucleotide with phosphorothioate linkage
  modified_base 17: mod_base = OTHER; note = 2'-O-methoxy-ethyl modified nucleotide with phosphorothioate linkage
  modified_base 18: mod_base = OTHER; note = 2'-O-methoxy-ethyl modified nucleotide with phosphorothioate linkage
  modified_base 19: mod_base = OTHER; note = 2'-O-methoxy-ethyl modified nucleotide with phosphorothioate linkage
  modified_base 20: mod_base = OTHER; note = 2'-O-methoxy-ethyl modified nucleotide
aaacgtacagaaatgggagg

SEQ ID NO: 545 - RNA, 20 nt, synthetic construct
  source 1..20: mol_type = other RNA
  modified_base 1: mod_base = OTHER; note = 2'-O-methoxy-ethyl modified nucleotide with phosphorothioate linkage
  modified_base 2: mod_base = OTHER; note = 2'-O-methoxy-ethyl modified nucleotide
  modified_base 3: mod_base = OTHER; note = 2'-O-methoxy-ethyl modified nucleotide with phosphorothioate linkage
  modified_base 4: mod_base = OTHER; note = 2'-O-methoxy-ethyl modified nucleotide with phosphorothioate linkage
  modified_base 5: mod_base = OTHER; note = 2'-O-methoxy-ethyl modified nucleotide with phosphorothioate linkage
  modified_base 6: mod_base = OTHER; note = 2'-O-methoxy-ethyl modified thymine with phosphorothioate linkage
  modified_base 7: mod_base = OTHER; note = 2'-O-methoxy-ethyl modified nucleotide with phosphorothioate linkage
  modified_base 8: mod_base = OTHER; note = 2'-O-methoxy-ethyl modified nucleotide with phosphorothioate linkage
  modified_base 9: mod_base = OTHER; note = 2'-O-methoxy-ethyl modified nucleotide with phosphorothioate linkage
  modified_base 10: mod_base = OTHER; note = 2'-O-methoxy-ethyl modified nucleotide with phosphorothioate linkage
  modified_base 11: mod_base = OTHER; note = 2'-O-methoxy-ethyl modified nucleotide with phosphorothioate linkage
  modified_base 12: mod_base = OTHER; note = 2'-O-methoxy-ethyl modified nucleotide with phosphorothioate linkage
  modified_base 13: mod_base = OTHER; note = 2'-O-methoxy-ethyl modified nucleotide with phosphorothioate linkage
  modified_base 14: mod_base = OTHER; note = 2'-O-methoxy-ethyl modified thymine with phosphorothioate linkage
  modified_base 15: mod_base = OTHER; note = 2'-O-methoxy-ethyl modified nucleotide with phosphorothioate linkage
  modified_base 16: mod_base = OTHER; note = 2'-O-methoxy-ethyl modified nucleotide with phosphorothioate linkage
  modified_base 17: mod_base = OTHER; note = 2'-O-methoxy-ethyl modified nucleotide
  modified_base 18: mod_base = OTHER; note = 2'-O-methoxy-ethyl modified nucleotide with phosphorothioate linkage
  modified_base 19: mod_base = OTHER; note = 2'-O-methoxy-ethyl modified nucleotide with phosphorothioate linkage
  modified_base 20: mod_base = OTHER; note = 2'-O-methoxy-ethyl modified nucleotide
aaacgtacagaaatgggagg

SEQ ID NO: 546 - RNA, 20 nt, synthetic construct
  source 1..20: mol_type = other RNA
  modified_base 1: mod_base = OTHER; note = 2'-O-methoxy-ethyl modified nucleotide with phosphorothioate linkage
  modified_base 2: mod_base = OTHER; note = 2'-O-methoxy-ethyl modified nucleotide with phosphorothioate linkage
  modified_base 3: mod_base = OTHER; note = 2'-O-methoxy-ethyl modified nucleotide
  modified_base 4: mod_base = OTHER; note = 2'-O-methoxy-ethyl modified nucleotide with phosphorothioate linkage
  modified_base 5: mod_base = OTHER; note = 2'-O-methoxy-ethyl modified nucleotide with phosphorothioate linkage
  modified_base 6: mod_base = OTHER; note = 2'-O-methoxy-ethyl modified thymine with phosphorothioate linkage
  modified_base 7: mod_base = OTHER; note = 2'-O-methoxy-ethyl modified nucleotide with phosphorothioate linkage
  modified_base 8: mod_base = OTHER; note = 2'-O-methoxy-ethyl modified nucleotide with phosphorothioate linkage
  modified_base 9: mod_base = OTHER; note = 2'-O-methoxy-ethyl modified nucleotide with phosphorothioate linkage
  modified_base 10: mod_base = OTHER; note = 2'-O-methoxy-ethyl modified nucleotide with phosphorothioate linkage
  modified_base 11: mod_base = OTHER; note = 2'-O-methoxy-ethyl modified nucleotide with phosphorothioate linkage
  modified_base 12: mod_base = OTHER; note = 2'-O-methoxy-ethyl modified nucleotide with phosphorothioate linkage
  modified_base 13: mod_base = OTHER; note = 2'-O-methoxy-ethyl modified nucleotide with phosphorothioate linkage
  modified_base 14: mod_base = OTHER; note = 2'-O-methoxy-ethyl modified thymine with phosphorothioate linkage
  modified_base 15: mod_base = OTHER; note = 2'-O-methoxy-ethyl modified nucleotide with phosphorothioate linkage
  modified_base 16: mod_base = OTHER; note = 2'-O-methoxy-ethyl modified nucleotide with phosphorothioate linkage
  modified_base 17: mod_base = OTHER; note = 2'-O-methoxy-ethyl modified nucleotide with phosphorothioate linkage
  modified_base 18: mod_base = OTHER; note = 2'-O-methoxy-ethyl modified nucleotide
  modified_base 19: mod_base = OTHER; note = 2'-O-methoxy-ethyl modified nucleotide with phosphorothioate linkage
  modified_base 20: mod_base = OTHER; note = 2'-O-methoxy-ethyl modified nucleotide
aaacgtacagaaatgggagg

SEQ ID NO: 547 - RNA, 20 nt, synthetic construct
  source 1..20: mol_type = other RNA
  modified_base 1: mod_base = OTHER; note = 2'-O-methoxy-ethyl modified nucleotide with phosphorothioate linkage
  modified_base 2: mod_base = OTHER; note = 2'-O-methoxy-ethyl modified nucleotide with phosphorothioate linkage
  modified_base 3: mod_base = OTHER; note = 2'-O-methoxy-ethyl modified nucleotide
  modified_base 4: mod_base = OTHER; note = 2'-O-methoxy-ethyl modified nucleotide with phosphorothioate linkage
  modified_base 5: mod_base = OTHER; note = 2'-O-methoxy-ethyl modified nucleotide with phosphorothioate linkage
  modified_base 6: mod_base = OTHER; note = 2'-O-methoxy-ethyl modified thymine with phosphorothioate linkage
  modified_base 7: mod_base = OTHER; note = 2'-O-methoxy-ethyl modified nucleotide with phosphorothioate linkage
  modified_base 8: mod_base = OTHER; note = 2'-O-methoxy-ethyl modified nucleotide with phosphorothioate linkage
  modified_base 9: mod_base = OTHER; note = 2'-O-methoxy-ethyl modified nucleotide with phosphorothioate linkage
  modified_base 10: mod_base = OTHER; note = 2'-O-methoxy-ethyl modified nucleotide with phosphorothioate linkage
  modified_base 11: mod_base = OTHER; note = 2'-O-methoxy-ethyl modified nucleotide with phosphorothioate linkage
  modified_base 12: mod_base = OTHER; note = 2'-O-methoxy-ethyl modified nucleotide with phosphorothioate linkage
  modified_base 13: mod_base = OTHER; note = 2'-O-methoxy-ethyl modified nucleotide with phosphorothioate linkage
  modified_base 14: mod_base = OTHER; note = 2'-O-methoxy-ethyl modified thymine with phosphorothioate linkage
  modified_base 15: mod_base = OTHER; note = 2'-O-methoxy-ethyl modified nucleotide with phosphorothioate linkage
  modified_base 16: mod_base = OTHER; note = 2'-O-methoxy-ethyl modified nucleotide
  modified_base 17: mod_base = OTHER; note = 2'-O-methoxy-ethyl modified nucleotide with phosphorothioate linkage
  modified_base 18: mod_base = OTHER; note = 2'-O-methoxy-ethyl modified nucleotide with phosphorothioate linkage
  modified_base 19: mod_base = OTHER; note = 2'-O-methoxy-ethyl modified nucleotide with phosphorothioate linkage
  modified_base 20: mod_base = OTHER; note = 2'-O-methoxy-ethyl modified nucleotide
aaacgtacagaaatgggagg

SEQ ID NO: 548 - RNA, 20 nt, synthetic construct
  source 1..20: mol_type = other RNA
  modified_base 1: mod_base = OTHER; note = 2'-O-methoxy-ethyl modified nucleotide with phosphorothioate linkage
  modified_base 2: mod_base = OTHER; note = 2'-O-methoxy-ethyl modified nucleotide with phosphorothioate linkage
  modified_base 3: mod_base = OTHER; note = 2'-O-methoxy-ethyl modified nucleotide with phosphorothioate linkage
  modified_base 4: mod_base = OTHER; note = 2'-O-methoxy-ethyl modified nucleotide
  modified_base 5: mod_base = OTHER; note = 2'-O-methoxy-ethyl modified nucleotide with phosphorothioate linkage
  modified_base 6: mod_base = OTHER; note = 2'-O-methoxy-ethyl modified thymine with phosphorothioate linkage
  modified_base 7: mod_base = OTHER; note = 2'-O-methoxy-ethyl modified nucleotide with phosphorothioate linkage
  modified_base 8: mod_base = OTHER; note = 2'-O-methoxy-ethyl modified nucleotide with phosphorothioate linkage
  modified_base 9: mod_base = OTHER; note = 2'-O-methoxy-ethyl modified nucleotide with phosphorothioate linkage
  modified_base 10: mod_base = OTHER; note = 2'-O-methoxy-ethyl modified nucleotide with phosphorothioate linkage
  modified_base 11: mod_base = OTHER; note = 2'-O-methoxy-ethyl modified nucleotide with phosphorothioate linkage
  modified_base 12: mod_base = OTHER; note = 2'-O-methoxy-ethyl modified nucleotide with phosphorothioate linkage
  modified_base 13: mod_base = OTHER; note = 2'-O-methoxy-ethyl modified nucleotide with phosphorothioate linkage
  modified_base 14: mod_base = OTHER; note = 2'-O-methoxy-ethyl modified thymine with phosphorothioate linkage
  modified_base 15: mod_base = OTHER; note = 2'-O-methoxy-ethyl modified nucleotide with phosphorothioate linkage
  modified_base 16: mod_base = OTHER; note = 2'-O-methoxy-ethyl modified nucleotide with phosphorothioate linkage
  modified_base 17: mod_base = OTHER; note = 2'-O-methoxy-ethyl modified nucleotide
  modified_base 18: mod_base = OTHER; note = 2'-O-methoxy-ethyl modified nucleotide with phosphorothioate linkage
  modified_base 19: mod_base = OTHER; note = 2'-O-methoxy-ethyl modified nucleotide with phosphorothioate linkage
  modified_base 20: mod_base = OTHER; note = 2'-O-methoxy-ethyl modified nucleotide
aaacgtacagaaatgggagg

SEQ ID NO: 549 - RNA, 20 nt, synthetic construct
  source 1..20: mol_type = other RNA
  modified_base 1: mod_base = OTHER; note = 2'-O-methoxy-ethyl modified nucleotide with phosphorothioate linkage
  modified_base 2: mod_base = OTHER; note = 2'-O-methoxy-ethyl modified nucleotide with phosphorothioate linkage
  modified_base 3: mod_base = OTHER; note = 2'-O-methoxy-ethyl modified nucleotide with phosphorothioate linkage
  modified_base 4: mod_base = OTHER; note = 2'-O-methoxy-ethyl modified nucleotide
  modified_base 5: mod_base = OTHER; note = 2'-O-methoxy-ethyl modified nucleotide with phosphorothioate linkage
  modified_base 6: mod_base = OTHER; note = 2'-O-methoxy-ethyl modified thymine with phosphorothioate linkage
  modified_base 7: mod_base = OTHER; note = 2'-O-methoxy-ethyl modified nucleotide with phosphorothioate linkage
  modified_base 8: mod_base = OTHER; note = 2'-O-methoxy-ethyl modified nucleotide with phosphorothioate linkage
  modified_base 9: mod_base = OTHER; note = 2'-O-methoxy-ethyl modified nucleotide with phosphorothioate linkage
  modified_base 10: mod_base = OTHER; note = 2'-O-methoxy-ethyl modified nucleotide with phosphorothioate linkage
  modified_base 11: mod_base = OTHER; note = 2'-O-methoxy-ethyl modified nucleotide with phosphorothioate linkage
  modified_base 12: mod_base = OTHER; note = 2'-O-methoxy-ethyl modified nucleotide with phosphorothioate linkage
  modified_base 13: mod_base = OTHER; note = 2'-O-methoxy-ethyl modified nucleotide with phosphorothioate linkage
  modified_base 14: mod_base = OTHER; note = 2'-O-methoxy-ethyl modified thymine with phosphorothioate linkage
  modified_base 15: mod_base = OTHER; note = 2'-O-methoxy-ethyl modified nucleotide
  modified_base 16: mod_base = OTHER; note = 2'-O-methoxy-ethyl modified nucleotide with phosphorothioate linkage
  modified_base 17: mod_base = OTHER; note = 2'-O-methoxy-ethyl modified nucleotide with phosphorothioate linkage
  modified_base 18: mod_base = OTHER; note = 2'-O-methoxy-ethyl modified nucleotide with phosphorothioate linkage
  modified_base 19: mod_base = OTHER; note = 2'-O-methoxy-ethyl modified nucleotide with phosphorothioate linkage
  modified_base 20: mod_base = OTHER; note = 2'-O-methoxy-ethyl modified nucleotide
aaacgtacagaaatgggagg

SEQ ID NO: 550 - RNA, 20 nt, synthetic construct
  source 1..20: mol_type = other RNA
  modified_base 1: mod_base = OTHER; note = 2'-O-methoxy-ethyl modified nucleotide with phosphorothioate linkage
  modified_base 2: mod_base = OTHER; note = 2'-O-methoxy-ethyl modified nucleotide with phosphorothioate linkage
  modified_base 3: mod_base = OTHER; note = 2'-O-methoxy-ethyl modified nucleotide with phosphorothioate linkage
  modified_base 4: mod_base = OTHER; note = 2'-O-methoxy-ethyl modified nucleotide with phosphorothioate linkage
  modified_base 5: mod_base = OTHER; note = 2'-O-methoxy-ethyl modified nucleotide
  modified_base 6: mod_base = OTHER; note = 2'-O-methoxy-ethyl modified thymine with phosphorothioate linkage
  modified_base 7: mod_base = OTHER; note = 2'-O-methoxy-ethyl modified nucleotide with phosphorothioate linkage
  modified_base 8: mod_base = OTHER; note = 2'-O-methoxy-ethyl modified nucleotide with phosphorothioate linkage
  modified_base 9: mod_base = OTHER; note = 2'-O-methoxy-ethyl modified nucleotide with phosphorothioate linkage
  modified_base 10: mod_base = OTHER; note = 2'-O-methoxy-ethyl modified nucleotide with phosphorothioate linkage
  modified_base 11: mod_base = OTHER; note = 2'-O-methoxy-ethyl modified nucleotide with phosphorothioate linkage
  modified_base 12: mod_base = OTHER; note = 2'-O-methoxy-ethyl modified nucleotide with phosphorothioate linkage
  modified_base 13: mod_base = OTHER; note = 2'-O-methoxy-ethyl modified nucleotide with phosphorothioate linkage
  modified_base 14: mod_base = OTHER; note = 2'-O-methoxy-ethyl modified thymine with phosphorothioate linkage
  modified_base 15: mod_base = OTHER; note = 2'-O-methoxy-ethyl modified nucleotide with phosphorothioate linkage
  modified_base 16: mod_base = OTHER; note = 2'-O-methoxy-ethyl modified nucleotide
  modified_base 17: mod_base = OTHER; note = 2'-O-methoxy-ethyl modified nucleotide with phosphorothioate linkage
  modified_base 18: mod_base = OTHER; note = 2'-O-methoxy-ethyl modified nucleotide with phosphorothioate linkage
  modified_base 19: mod_base = OTHER; note = 2'-O-methoxy-ethyl modified nucleotide with phosphorothioate linkage
  modified_base 20: mod_base = OTHER; note = 2'-O-methoxy-ethyl modified nucleotide
aaacgtacagaaatgggagg

SEQ ID NO: 551 - RNA, 20 nt, synthetic construct
  source 1..20: mol_type = other RNA
  modified_base 1: mod_base = OTHER; note = 2'-O-methoxy-ethyl modified nucleotide with phosphorothioate linkage
  modified_base 2: mod_base = OTHER; note = 2'-O-methoxy-ethyl modified nucleotide with phosphorothioate linkage
  modified_base 3: mod_base = OTHER; note = 2'-O-methoxy-ethyl modified nucleotide with phosphorothioate linkage
  modified_base 4: mod_base = OTHER; note = 2'-O-methoxy-ethyl modified nucleotide with phosphorothioate linkage
  modified_base 5: mod_base = OTHER; note = 2'-O-methoxy-ethyl modified thymine with phosphorothioate linkage
  modified_base 6: mod_base = OTHER; note = 2'-O-methoxy-ethyl modified nucleotide with phosphorothioate linkage
  modified_base 7: mod_base = OTHER; note = 2'-O-methoxy-ethyl modified nucleotide with phosphorothioate linkage
  modified_base 8: mod_base = OTHER; note = 2'-O-methoxy-ethyl modified nucleotide with phosphorothioate linkage
  modified_base 9: mod_base = OTHER; note = 2'-O-methoxy-ethyl modified nucleotide with phosphorothioate linkage
  modified_base 10: mod_base = OTHER; note = 2'-O-methoxy-ethyl modified nucleotide with phosphorothioate linkage
  modified_base 11: mod_base = OTHER; note = 2'-O-methoxy-ethyl modified nucleotide with phosphorothioate linkage
  modified_base 12: mod_base = OTHER; note = 2'-O-methoxy-ethyl modified nucleotide with phosphorothioate linkage
  modified_base 13: mod_base = OTHER; note = 2'-O-methoxy-ethyl modified thymine with phosphorothioate linkage
  modified_base 14: mod_base = OTHER; note = 2'-O-methoxy-ethyl modified nucleotide with phosphorothioate linkage
  modified_base 15: mod_base = OTHER; note = 2'-O-methoxy-ethyl modified nucleotide with phosphorothioate linkage
  modified_base 16: mod_base = OTHER; note = 2'-O-methoxy-ethyl modified nucleotide with phosphorothioate linkage
  modified_base 17: mod_base = OTHER; note = 2'-O-methoxy-ethyl modified nucleotide with phosphorothioate linkage
  modified_base 18: mod_base = OTHER; note = 2'-O-methoxy-ethyl modified nucleotide with phosphorothioate linkage
  modified_base 19: mod_base = OTHER; note = 2'-O-methoxy-ethyl modified nucleotide with phosphorothioate linkage
  modified_base 20: mod_base = OTHER; note = 2'-O-methoxy-ethyl modified nucleotide
aacgtacagaaatgggaggg

SEQ ID NO: 552 - RNA, 20 nt, synthetic construct
  source 1..20: mol_type = other RNA
  modified_base 1: mod_base = OTHER; note = Locked nucleotide with phosphorothioate linkage
  modified_base 2: mod_base = OTHER; note = 2'-O-methoxy-ethyl modified nucleotide with phosphorothioate linkage
  modified_base 3: mod_base = OTHER; note = 2'-O-methoxy-ethyl modified nucleotide with phosphorothioate linkage
  modified_base 4: mod_base = OTHER; note = 2'-O-methoxy-ethyl modified nucleotide with phosphorothioate linkage
  modified_base 5: mod_base = OTHER; note = 2'-O-methoxy-ethyl modified thymine with phosphorothioate linkage
  modified_base 6: mod_base = OTHER; note = 2'-O-methoxy-ethyl modified nucleotide with phosphorothioate linkage
  modified_base 7: mod_base = OTHER; note = 2'-O-methoxy-ethyl modified nucleotide with phosphorothioate linkage
  modified_base 8: mod_base = OTHER; note = 2'-O-methoxy-ethyl modified nucleotide with phosphorothioate linkage
  modified_base 9: mod_base = OTHER; note = 2'-O-methoxy-ethyl modified nucleotide with phosphorothioate linkage
  modified_base 10: mod_base = OTHER; note = 2'-O-methoxy-ethyl modified nucleotide with phosphorothioate linkage
  modified_base 11: mod_base = OTHER; note = 2'-O-methoxy-ethyl modified nucleotide with phosphorothioate linkage
  modified_base 12: mod_base = OTHER; note = 2'-O-methoxy-ethyl modified nucleotide with phosphorothioate linkage
  modified_base 13: mod_base = OTHER; note = 2'-O-methoxy-ethyl modified thymine with phosphorothioate linkage
  modified_base 14: mod_base = OTHER; note = 2'-O-methoxy-ethyl modified nucleotide with phosphorothioate linkage
  modified_base 15: mod_base = OTHER; note = 2'-O-methoxy-ethyl modified nucleotide with phosphorothioate linkage
  modified_base 16: mod_base = OTHER; note = 2'-O-methoxy-ethyl modified nucleotide with phosphorothioate linkage
  modified_base 17: mod_base = OTHER; note = 2'-O-methoxy-ethyl modified nucleotide with phosphorothioate linkage
  modified_base 18: mod_base = OTHER; note = 2'-O-methoxy-ethyl modified nucleotide with phosphorothioate linkage
  modified_base 19: mod_base = OTHER; note = 2'-O-methoxy-ethyl modified nucleotide with phosphorothioate linkage
  modified_base 20: mod_base = OTHER; note = 2'-O-methoxy-ethyl modified nucleotide
aacgtacagaaatgggaggg

SEQ ID NO: 553 - RNA, 20 nt, synthetic construct
  source 1..20: mol_type = other RNA
  modified_base 1: mod_base = OTHER; note = 2'-O-methoxy-ethyl modified nucleotide with phosphorothioate linkage
  modified_base 2: mod_base = OTHER; note = Locked nucleotide with phosphorothioate linkage
  modified_base 3: mod_base = OTHER; note = 2'-O-methoxy-ethyl modified nucleotide with phosphorothioate linkage
  modified_base 4: mod_base = OTHER; note = 2'-O-methoxy-ethyl modified nucleotide with phosphorothioate linkage
  modified_base 5: mod_base = OTHER; note = 2'-O-methoxy-ethyl modified thymine with phosphorothioate linkage
  modified_base 6: mod_base = OTHER; note = 2'-O-methoxy-ethyl modified nucleotide with phosphorothioate linkage
  modified_base 7: mod_base = OTHER; note = 2'-O-methoxy-ethyl modified nucleotide with phosphorothioate linkage
  modified_base 8: mod_base = OTHER; note = 2'-O-methoxy-ethyl modified nucleotide with phosphorothioate linkage
  modified_base 9: mod_base = OTHER; note = 2'-O-methoxy-ethyl modified nucleotide with phosphorothioate linkage
  modified_base 10: mod_base = OTHER; note = 2'-O-methoxy-ethyl modified nucleotide with phosphorothioate linkage
  modified_base 11: mod_base = OTHER; note = 2'-O-methoxy-ethyl modified nucleotide with phosphorothioate linkage
  modified_base 12: mod_base = OTHER; note = 2'-O-methoxy-ethyl modified nucleotide with phosphorothioate linkage
  modified_base 13: mod_base = OTHER; note = 2'-O-methoxy-ethyl modified thymine with phosphorothioate linkage
  modified_base 14: mod_base = OTHER; note = 2'-O-methoxy-ethyl modified nucleotide with phosphorothioate linkage
  modified_base 15: mod_base = OTHER; note = 2'-O-methoxy-ethyl modified nucleotide with phosphorothioate linkage
  modified_base 16: mod_base = OTHER; note = 2'-O-methoxy-ethyl modified nucleotide with phosphorothioate linkage
  modified_base 17: mod_base = OTHER; note = 2'-O-methoxy-ethyl modified nucleotide with phosphorothioate linkage
  modified_base 18: mod_base = OTHER; note = 2'-O-methoxy-ethyl modified nucleotide with phosphorothioate linkage
  modified_base 19: mod_base = OTHER; note = 2'-O-methoxy-ethyl modified nucleotide with phosphorothioate linkage
  modified_base 20: mod_base = OTHER; note = 2'-O-methoxy-ethyl modified nucleotide
aacgtacagaaatgggaggg

SEQ ID NO: 554 - RNA, 20 nt, synthetic construct
  source 1..20: mol_type = other RNA
  modified_base 1: mod_base = OTHER; note = 2'-O-methoxy-ethyl modified nucleotide with phosphorothioate linkage
  modified_base 2: mod_base = OTHER; note = 2'-O-methoxy-ethyl modified nucleotide with phosphorothioate linkage
  modified_base 3: mod_base = OTHER; note = Locked nucleotide with phosphorothioate linkage
  modified_base 4: mod_base = OTHER; note = 2'-O-methoxy-ethyl modified nucleotide with phosphorothioate linkage
  modified_base 5: mod_base = OTHER; note = 2'-O-methoxy-ethyl modified thymine with phosphorothioate linkage
  modified_base 6: mod_base = OTHER; note = 2'-O-methoxy-ethyl modified nucleotide with phosphorothioate linkage
  modified_base 7: mod_base = OTHER; note = 2'-O-methoxy-ethyl modified nucleotide with phosphorothioate linkage
  modified_base 8: mod_base = OTHER; note = 2'-O-methoxy-ethyl modified nucleotide with phosphorothioate linkage
  modified_base 9: mod_base = OTHER; note = 2'-O-methoxy-ethyl modified nucleotide with phosphorothioate linkage
  modified_base 10: mod_base = OTHER; note = 2'-O-methoxy-ethyl modified nucleotide with phosphorothioate linkage
  modified_base 11: mod_base = OTHER; note = 2'-O-methoxy-ethyl modified nucleotide with phosphorothioate linkage
  modified_base 12: mod_base = OTHER; note = 2'-O-methoxy-ethyl modified nucleotide with phosphorothioate linkage
  modified_base 13: mod_base = OTHER; note = 2'-O-methoxy-ethyl modified thymine with phosphorothioate linkage
  modified_base 14: mod_base = OTHER; note = 2'-O-methoxy-ethyl modified nucleotide with phosphorothioate linkage
  modified_base 15: mod_base = OTHER; note = 2'-O-methoxy-ethyl modified nucleotide with phosphorothioate linkage
  modified_base 16: mod_base = OTHER; note = 2'-O-methoxy-ethyl modified nucleotide with phosphorothioate linkage
  modified_base 17: mod_base = OTHER; note = 2'-O-methoxy-ethyl modified nucleotide with phosphorothioate linkage
  modified_base 18: mod_base = OTHER; note = 2'-O-methoxy-ethyl modified nucleotide with phosphorothioate linkage
  modified_base 19: mod_base = OTHER; note = 2'-O-methoxy-ethyl modified nucleotide with phosphorothioate linkage
  modified_base 20: mod_base = OTHER; note = 2'-O-methoxy-ethyl modified nucleotide
aacgtacagaaatgggaggg

SEQ ID NO: 555 - RNA, 20 nt, synthetic construct
  source 1..20: mol_type = other RNA
  modified_base 1: mod_base = OTHER; note = 2'-O-methoxy-ethyl modified nucleotide with phosphorothioate linkage
  modified_base 2: mod_base = OTHER; note = 2'-O-methoxy-ethyl modified nucleotide with phosphorothioate linkage
  modified_base 3: mod_base = OTHER; note = 2'-O-methoxy-ethyl modified nucleotide with phosphorothioate linkage
  modified_base 4: mod_base = OTHER; note = Locked nucleotide with phosphorothioate linkage
  modified_base 5: mod_base = OTHER; note = 2'-O-methoxy-ethyl modified thymine with phosphorothioate linkage
  modified_base 6: mod_base = OTHER; note = 2'-O-methoxy-ethyl modified nucleotide with phosphorothioate linkage
  modified_base 7: mod_base = OTHER; note = 2'-O-methoxy-ethyl modified nucleotide with phosphorothioate linkage
  modified_base 8: mod_base = OTHER; note = 2'-O-methoxy-ethyl modified nucleotide with phosphorothioate linkage
  modified_base 9: mod_base = OTHER; note = 2'-O-methoxy-ethyl modified nucleotide with phosphorothioate linkage
  modified_base 10: mod_base = OTHER; note = 2'-O-methoxy-ethyl modified nucleotide with phosphorothioate linkage
  modified_base 11: mod_base = OTHER; note = 2'-O-methoxy-ethyl modified nucleotide with phosphorothioate linkage
  modified_base 12: mod_base = OTHER; note = 2'-O-methoxy-ethyl modified nucleotide with phosphorothioate linkage
  modified_base 13: mod_base = OTHER; note = 2'-O-methoxy-ethyl modified thymine with phosphorothioate linkage
  modified_base 14: mod_base = OTHER; note = 2'-O-methoxy-ethyl modified nucleotide with phosphorothioate linkage
  modified_base 15: mod_base = OTHER; note = 2'-O-methoxy-ethyl modified nucleotide with phosphorothioate linkage
  modified_base 16: mod_base = OTHER; note = 2'-O-methoxy-ethyl modified nucleotide with phosphorothioate linkage
  modified_base 17: mod_base = OTHER; note = 2'-O-methoxy-ethyl modified nucleotide with phosphorothioate linkage
  modified_base 18: mod_base = OTHER; note = 2'-O-methoxy-ethyl modified nucleotide with phosphorothioate linkage
  modified_base 19: mod_base = OTHER; note = 2'-O-methoxy-ethyl modified nucleotide with phosphorothioate linkage
  modified_base 20: mod_base = OTHER; note = 2'-O-methoxy-ethyl modified nucleotide
aacgtacagaaatgggaggg

SEQ ID NO: 556 - RNA, 20 nt, synthetic construct
  source 1..20: mol_type = other RNA
  modified_base 1: mod_base = OTHER; note = 2'-O-methoxy-ethyl modified nucleotide with phosphorothioate linkage
  modified_base 2: mod_base = OTHER; note = 2'-O-methoxy-ethyl modified nucleotide with phosphorothioate linkage
  modified_base 3: mod_base = OTHER; note = 2'-O-methoxy-ethyl modified nucleotide with phosphorothioate linkage
  modified_base 4: mod_base = OTHER; note = 2'-O-methoxy-ethyl modified nucleotide with phosphorothioate linkage
  modified_base 5: mod_base = OTHER; note = Locked thymine with phosphorothioate linkage
  modified_base 6: mod_base = OTHER; note = 2'-O-methoxy-ethyl modified nucleotide with phosphorothioate linkage
  modified_base 7: mod_base = OTHER; note = 2'-O-methoxy-ethyl modified nucleotide with phosphorothioate linkage
  modified_base 8: mod_base = OTHER; note = 2'-O-methoxy-ethyl modified nucleotide with phosphorothioate linkage
  modified_base 9: mod_base = OTHER; note = 2'-O-methoxy-ethyl modified nucleotide with phosphorothioate linkage
  modified_base 10: mod_base = OTHER; note = 2'-O-methoxy-ethyl modified nucleotide with phosphorothioate linkage
  modified_base 11: mod_base = OTHER; note = 2'-O-methoxy-ethyl modified nucleotide with phosphorothioate linkage
  modified_base 12: mod_base = OTHER; note = 2'-O-methoxy-ethyl modified nucleotide with phosphorothioate linkage
  modified_base 13: mod_base = OTHER; note = 2'-O-methoxy-ethyl modified thymine with phosphorothioate linkage
  modified_base 14: mod_base = OTHER; note = 2'-O-methoxy-ethyl modified nucleotide with phosphorothioate linkage
  modified_base 15: mod_base = OTHER; note = 2'-O-methoxy-ethyl modified nucleotide with phosphorothioate linkage
  modified_base 16: mod_base = OTHER; note = 2'-O-methoxy-ethyl modified nucleotide with phosphorothioate linkage
  modified_base 17: mod_base = OTHER; note = 2'-O-methoxy-ethyl modified nucleotide with phosphorothioate linkage
  modified_base 18: mod_base = OTHER; note = 2'-O-methoxy-ethyl modified nucleotide with phosphorothioate linkage
  modified_base 19: mod_base = OTHER; note = 2'-O-methoxy-ethyl modified nucleotide with phosphorothioate linkage
  modified_base 20: mod_base = OTHER; note = 2'-O-methoxy-ethyl modified nucleotide
aacgtacagaaatgggaggg

SEQ ID NO: 557 - RNA, 20 nt, synthetic construct
  source 1..20: mol_type = other RNA
  modified_base 1: mod_base = OTHER; note = 2'-O-methoxy-ethyl modified nucleotide with phosphorothioate linkage
  modified_base 2: mod_base = OTHER; note = 2'-O-methoxy-ethyl modified nucleotide with phosphorothioate linkage
  modified_base 3: mod_base = OTHER; note = 2'-O-methoxy-ethyl modified nucleotide with phosphorothioate linkage
  modified_base 4: mod_base = OTHER; note = 2'-O-methoxy-ethyl modified nucleotide with phosphorothioate linkage
  modified_base 5: mod_base = OTHER; note = 2'-O-methoxy-ethyl modified thymine with phosphorothioate linkage
  modified_base 6: mod_base = OTHER; note = Locked nucleotide with phosphorothioate linkage
  modified_base 7: mod_base = OTHER; note = 2'-O-methoxy-ethyl modified nucleotide with phosphorothioate linkage
  modified_base 8: mod_base = OTHER; note = 2'-O-methoxy-ethyl modified nucleotide with phosphorothioate linkage
  modified_base 9: mod_base = OTHER; note = 2'-O-methoxy-ethyl modified nucleotide with phosphorothioate linkage
  modified_base 10: mod_base = OTHER; note = 2'-O-methoxy-ethyl modified nucleotide with phosphorothioate linkage
  modified_base 11: mod_base = OTHER; note = 2'-O-methoxy-ethyl modified nucleotide with phosphorothioate linkage
  modified_base 12: mod_base = OTHER; note = 2'-O-methoxy-ethyl modified nucleotide with phosphorothioate linkage
  modified_base 13: mod_base = OTHER; note = 2'-O-methoxy-ethyl modified thymine with phosphorothioate linkage
  modified_base 14: mod_base = OTHER; note = 2'-O-methoxy-ethyl modified nucleotide with phosphorothioate linkage
  modified_base 15: mod_base = OTHER; note = 2'-O-methoxy-ethyl modified nucleotide with phosphorothioate linkage
  modified_base 16: mod_base = OTHER; note = 2'-O-methoxy-ethyl modified nucleotide with phosphorothioate linkage
  modified_base 17: mod_base = OTHER; note = 2'-O-methoxy-ethyl modified nucleotide with phosphorothioate linkage
  modified_base 18: mod_base = OTHER; note = 2'-O-methoxy-ethyl modified nucleotide with phosphorothioate linkage
  modified_base 19: mod_base = OTHER; note = 2'-O-methoxy-ethyl modified nucleotide with phosphorothioate linkage
  modified_base 20: mod_base = OTHER; note = 2'-O-methoxy-ethyl modified nucleotide
aacgtacagaaatgggaggg

SEQ ID NO: 558 - RNA, 20 nt, synthetic construct
  source 1..20: mol_type = other RNA
  modified_base 1: mod_base = OTHER; note = 2'-O-methoxy-ethyl modified nucleotide with phosphorothioate linkage
  modified_base 2: mod_base = OTHER; note = 2'-O-methoxy-ethyl modified nucleotide with phosphorothioate linkage
  modified_base 3: mod_base = OTHER; note = 2'-O-methoxy-ethyl modified nucleotide with phosphorothioate linkage
  modified_base 4: mod_base = OTHER; note = 2'-O-methoxy-ethyl modified nucleotide with phosphorothioate linkage
  modified_base 5: mod_base = OTHER; note = 2'-O-methoxy-ethyl modified thymine with phosphorothioate linkage
  modified_base 6: mod_base = OTHER; note = 2'-O-methoxy-ethyl modified nucleotide with phosphorothioate linkage
  modified_base 7: mod_base = OTHER; note = Locked nucleotide with phosphorothioate linkage
  modified_base 8: mod_base = OTHER; note = 2'-O-methoxy-ethyl modified nucleotide with phosphorothioate linkage
  modified_base 9: mod_base = OTHER; note = 2'-O-methoxy-ethyl modified nucleotide with phosphorothioate linkage
  modified_base 10: mod_base = OTHER; note = 2'-O-methoxy-ethyl modified nucleotide with phosphorothioate linkage
  modified_base 11: mod_base = OTHER; note = 2'-O-methoxy-ethyl modified nucleotide with phosphorothioate linkage
  modified_base 12: mod_base = OTHER; note = 2'-O-methoxy-ethyl modified nucleotide with phosphorothioate linkage
  modified_base 13: mod_base = OTHER; note = 2'-O-methoxy-ethyl modified thymine with phosphorothioate linkage
  modified_base 14: mod_base = OTHER; note = 2'-O-methoxy-ethyl modified nucleotide with phosphorothioate linkage
  modified_base 15: mod_base = OTHER; note = 2'-O-methoxy-ethyl modified nucleotide with phosphorothioate linkage
  modified_base 16: mod_base = OTHER; note = 2'-O-methoxy-ethyl modified nucleotide with phosphorothioate linkage
  modified_base 17: mod_base = OTHER; note = 2'-O-methoxy-ethyl modified nucleotide with phosphorothioate linkage
  modified_base 18: mod_base = OTHER; note = 2'-O-methoxy-ethyl modified nucleotide with phosphorothioate linkage
  modified_base 19: mod_base = OTHER; note = 2'-O-methoxy-ethyl modified nucleotide with phosphorothioate linkage
  modified_base 20: mod_base = OTHER; note = 2'-O-methoxy-ethyl modified nucleotide
aacgtacagaaatgggaggg

SEQ ID NO: 559 - RNA, 20 nt, synthetic construct
  source 1..20: mol_type = other RNA
  modified_base 1: mod_base = OTHER; note = 2'-O-methoxy-ethyl modified nucleotide with phosphorothioate linkage
  modified_base 2: mod_base = OTHER; note = 2'-O-methoxy-ethyl modified nucleotide with phosphorothioate linkage
  modified_base 3: mod_base = OTHER; note = 2'-O-methoxy-ethyl modified nucleotide with phosphorothioate linkage
  modified_base 4: mod_base = OTHER; note = 2'-O-methoxy-ethyl modified nucleotide with phosphorothioate linkage
  modified_base 5: mod_base = OTHER; note = 2'-O-methoxy-ethyl modified thymine with phosphorothioate linkage
  modified_base 6: mod_base = OTHER; note = 2'-O-methoxy-ethyl modified nucleotide with phosphorothioate linkage
  modified_base 7: mod_base = OTHER; note = 2'-O-methoxy-ethyl modified nucleotide with phosphorothioate linkage
  modified_base 8: mod_base = OTHER; note = Locked nucleotide with phosphorothioate linkage
  modified_base 9: mod_base = OTHER; note = 2'-O-methoxy-ethyl modified nucleotide with phosphorothioate linkage
  modified_base 10: mod_base = OTHER; note = 2'-O-methoxy-ethyl modified nucleotide with phosphorothioate linkage
  modified_base 11: mod_base = OTHER; note = 2'-O-methoxy-ethyl modified nucleotide with phosphorothioate linkage
  modified_base 12: mod_base = OTHER; note = 2'-O-methoxy-ethyl modified nucleotide with phosphorothioate linkage
  modified_base 13: mod_base = OTHER; note = 2'-O-methoxy-ethyl modified thymine with phosphorothioate linkage
  modified_base 14: mod_base = OTHER; note = 2'-O-methoxy-ethyl modified nucleotide with phosphorothioate linkage
  modified_base 15: mod_base = OTHER; note = 2'-O-methoxy-ethyl modified nucleotide with phosphorothioate linkage
  modified_base 16: mod_base = OTHER; note = 2'-O-methoxy-ethyl modified nucleotide with phosphorothioate linkage
  modified_base 17: mod_base = OTHER; note = 2'-O-methoxy-ethyl modified nucleotide with phosphorothioate linkage
  modified_base 18: mod_base = OTHER; note = 2'-O-methoxy-ethyl modified nucleotide with phosphorothioate linkage
  modified_base 19: mod_base = OTHER; note = 2'-O-methoxy-ethyl modified nucleotide with phosphorothioate linkage
  modified_base 20: mod_base = OTHER; note = 2'-O-methoxy-ethyl modified nucleotide
aacgtacagaaatgggaggg

SEQ ID NO: 560 - RNA, 20 nt, synthetic construct
  source 1..20: mol_type = other RNA
  modified_base 1: mod_base = OTHER; note = 2'-O-methoxy-ethyl modified nucleotide with phosphorothioate linkage
  modified_base 2: mod_base = OTHER; note = 2'-O-methoxy-ethyl modified nucleotide with phosphorothioate linkage
  modified_base 3: mod_base = OTHER; note = 2'-O-methoxy-ethyl modified nucleotide with phosphorothioate linkage
  modified_base 4: mod_base = OTHER; note = 2'-O-methoxy-ethyl modified nucleotide with phosphorothioate linkage
  modified_base 5: mod_base = OTHER; note = 2'-O-methoxy-ethyl modified thymine with phosphorothioate linkage
  modified_base 6: mod_base = OTHER; note = 2'-O-methoxy-ethyl modified nucleotide with phosphorothioate linkage
  modified_base 7: mod_base = OTHER; note = 2'-O-methoxy-ethyl modified nucleotide with phosphorothioate linkage
  modified_base 8: mod_base = OTHER; note = 2'-O-methoxy-ethyl modified nucleotide with phosphorothioate linkage
  modified_base 9: mod_base = OTHER; note = Locked nucleotide with phosphorothioate linkage
  modified_base 10: mod_base = OTHER; note = 2'-O-methoxy-ethyl modified nucleotide with phosphorothioate linkage
  modified_base 11: mod_base = OTHER; note = 2'-O-methoxy-ethyl modified nucleotide with phosphorothioate linkage
  modified_base 12: mod_base = OTHER; note = 2'-O-methoxy-ethyl modified nucleotide with phosphorothioate linkage
  modified_base 13: mod_base = OTHER; note = 2'-O-methoxy-ethyl modified thymine with phosphorothioate linkage
  modified_base 14: mod_base = OTHER; note = 2'-O-methoxy-ethyl modified nucleotide with phosphorothioate linkage
  modified_base 15: mod_base = OTHER; note = 2'-O-methoxy-ethyl modified nucleotide with phosphorothioate linkage
  modified_base 16: mod_base = OTHER; note = 2'-O-methoxy-ethyl modified nucleotide with phosphorothioate linkage
  modified_base 17: mod_base = OTHER; note = 2'-O-methoxy-ethyl modified nucleotide with phosphorothioate linkage
  modified_base 18: mod_base = OTHER; note = 2'-O-methoxy-ethyl modified nucleotide with phosphorothioate linkage
  modified_base 19: mod_base = OTHER; note = 2'-O-methoxy-ethyl modified nucleotide with phosphorothioate linkage
  modified_base 20: mod_base = OTHER; note = 2'-O-methoxy-ethyl modified nucleotide
aacgtacagaaatgggaggg

SEQ ID NO: 561 - RNA, 20 nt, synthetic construct
  source 1..20: mol_type = other RNA
  modified_base 1: mod_base = OTHER; note = 2'-O-methoxy-ethyl modified nucleotide with phosphorothioate linkage
  modified_base 2: mod_base = OTHER; note = 2'-O-methoxy-ethyl modified nucleotide with phosphorothioate linkage
  modified_base 3: mod_base = OTHER; note = 2'-O-methoxy-ethyl modified nucleotide with phosphorothioate linkage
  modified_base 4: mod_base = OTHER; note = 2'-O-methoxy-ethyl modified nucleotide with phosphorothioate linkage
  modified_base 5: mod_base = OTHER; note = 2'-O-methoxy-ethyl modified thymine with phosphorothioate linkage
  modified_base 6: mod_base = OTHER; note = 2'-O-methoxy-ethyl modified nucleotide with phosphorothioate linkage
  modified_base 7: mod_base = OTHER; note = 2'-O-methoxy-ethyl modified nucleotide with phosphorothioate linkage
  modified_base 8: mod_base = OTHER; note = 2'-O-methoxy-ethyl modified nucleotide with phosphorothioate linkage
  modified_base 9: mod_base = OTHER; note = 2'-O-methoxy-ethyl modified nucleotide with phosphorothioate linkage
  modified_base 10: mod_base = OTHER; note = Locked nucleotide with phosphorothioate linkage
  modified_base 11: mod_base = OTHER; note = 2'-O-methoxy-ethyl modified nucleotide with phosphorothioate linkage
  modified_base 12: mod_base = OTHER; note = 2'-O-methoxy-ethyl modified nucleotide with phosphorothioate linkage
  modified_base 13: mod_base = OTHER; note = 2'-O-methoxy-ethyl modified thymine with phosphorothioate linkage
  modified_base 14: mod_base = OTHER; note = 2'-O-methoxy-ethyl modified nucleotide with phosphorothioate linkage
  modified_base 15: mod_base = OTHER; note = 2'-O-methoxy-ethyl modified nucleotide with phosphorothioate linkage
  modified_base 16: mod_base = OTHER; note = 2'-O-methoxy-ethyl modified nucleotide with phosphorothioate linkage
  modified_base 17: mod_base = OTHER; note = 2'-O-methoxy-ethyl modified nucleotide with phosphorothioate linkage
  modified_base 18: mod_base = OTHER; note = 2'-O-methoxy-ethyl modified nucleotide with phosphorothioate linkage
  modified_base 19: mod_base = OTHER; note = 2'-O-methoxy-ethyl modified nucleotide with phosphorothioate linkage
  modified_base 20: mod_base = OTHER; note = 2'-O-methoxy-ethyl modified nucleotide
aacgtacagaaatgggaggg

SEQ ID NO: 562 - RNA, 20 nt, synthetic construct
  source 1..20: mol_type = other RNA
  modified_base 1: mod_base = OTHER; note = 2'-O-methoxy-ethyl modified nucleotide with phosphorothioate linkage
  modified_base 2: mod_base = OTHER; note = 2'-O-methoxy-ethyl modified nucleotide with phosphorothioate linkage
  modified_base 3: mod_base = OTHER; note = 2'-O-methoxy-ethyl modified nucleotide with phosphorothioate linkage
  modified_base 4: mod_base = OTHER; note = 2'-O-methoxy-ethyl modified nucleotide with phosphorothioate linkage
  modified_base 5: mod_base = OTHER; note = 2'-O-methoxy-ethyl modified thymine with phosphorothioate linkage
  modified_base 6: mod_base = OTHER; note = 2'-O-methoxy-ethyl modified nucleotide with phosphorothioate linkage
  modified_base 7: mod_base = OTHER; note = 2'-O-methoxy-ethyl modified nucleotide with phosphorothioate linkage
  modified_base 8: mod_base = OTHER; note = 2'-O-methoxy-ethyl modified nucleotide with phosphorothioate linkage
  modified_base 9: mod_base = OTHER; note = 2'-O-methoxy-ethyl modified nucleotide with phosphorothioate linkage
  modified_base 10: mod_base = OTHER; note = 2'-O-methoxy-ethyl modified nucleotide with phosphorothioate linkage
  modified_base 11: mod_base = OTHER; note = Locked nucleotide with phosphorothioate linkage
  modified_base 12: mod_base = OTHER; note = 2'-O-methoxy-ethyl modified nucleotide with phosphorothioate linkage
  modified_base 13: mod_base = OTHER; note = 2'-O-methoxy-ethyl modified thymine with phosphorothioate linkage
  modified_base 14: mod_base = OTHER; note = 2'-O-methoxy-ethyl modified nucleotide with phosphorothioate linkage
  modified_base 15: mod_base = OTHER; note = 2'-O-methoxy-ethyl modified nucleotide with phosphorothioate linkage
  modified_base 16: mod_base = OTHER; note = 2'-O-methoxy-ethyl modified nucleotide with phosphorothioate linkage
  modified_base 17: mod_base = OTHER; note = 2'-O-methoxy-ethyl modified nucleotide with phosphorothioate linkage
  modified_base 18: mod_base = OTHER; note = 2'-O-methoxy-ethyl modified nucleotide with phosphorothioate linkage
  modified_base 19: mod_base = OTHER; note = 2'-O-methoxy-ethyl modified nucleotide with phosphorothioate linkage
  modified_base 20: mod_base = OTHER; note = 2'-O-methoxy-ethyl modified nucleotide
aacgtacagaaatgggaggg

SEQ ID NO: 563 - RNA, 20 nt, synthetic construct
  source 1..20: mol_type = other RNA
  modified_base 1: mod_base = OTHER; note = 2'-O-methoxy-ethyl modified nucleotide with phosphorothioate linkage
  modified_base 2: mod_base = OTHER; note = 2'-O-methoxy-ethyl modified nucleotide with phosphorothioate linkage
  modified_base 3: mod_base = OTHER; note = 2'-O-methoxy-ethyl modified nucleotide with phosphorothioate linkage
  modified_base 4: mod_base = OTHER; note = 2'-O-methoxy-ethyl modified nucleotide with phosphorothioate linkage
  modified_base 5: mod_base = OTHER; note = 2'-O-methoxy-ethyl modified thymine with phosphorothioate linkage
  modified_base 6: mod_base = OTHER; note = 2'-O-methoxy-ethyl modified nucleotide with phosphorothioate linkage
  modified_base 7: mod_base = OTHER; note = 2'-O-methoxy-ethyl modified nucleotide with phosphorothioate linkage
  modified_base 8: mod_base = OTHER; note = 2'-O-methoxy-ethyl modified nucleotide with phosphorothioate linkage
  modified_base 9: mod_base = OTHER; note = 2'-O-methoxy-ethyl modified nucleotide with phosphorothioate linkage
  modified_base 10: mod_base = OTHER; note = 2'-O-methoxy-ethyl modified nucleotide with phosphorothioate linkage
  modified_base 11: mod_base = OTHER; note = 2'-O-methoxy-ethyl modified nucleotide with phosphorothioate linkage
  modified_base 12: mod_base = OTHER; note = Locked nucleotide with phosphorothioate linkage
  modified_base 13: mod_base = OTHER; note = 2'-O-methoxy-ethyl modified thymine with phosphorothioate linkage
  modified_base 14: mod_base = OTHER; note = 2'-O-methoxy-ethyl modified nucleotide with phosphorothioate linkage
  modified_base 15: mod_base = OTHER; note = 2'-O-methoxy-ethyl modified nucleotide with phosphorothioate linkage
  modified_base 16: mod_base = OTHER; note = 2'-O-methoxy-ethyl modified nucleotide with phosphorothioate linkage
  modified_base 17: mod_base = OTHER; note = 2'-O-methoxy-ethyl modified nucleotide with phosphorothioate linkage
  modified_base 18: mod_base = OTHER; note = 2'-O-methoxy-ethyl modified nucleotide with phosphorothioate linkage
  modified_base 19: mod_base = OTHER; note = 2'-O-methoxy-ethyl modified nucleotide with phosphorothioate linkage
  modified_base 20: mod_base = OTHER; note = 2'-O-methoxy-ethyl modified nucleotide
aacgtacagaaatgggaggg

SEQ ID NO: 564 - RNA, 20 nt, synthetic construct
  source 1..20: mol_type = other RNA
  modified_base 1: mod_base = OTHER; note = 2'-O-methoxy-ethyl modified nucleotide with phosphorothioate linkage
  modified_base 2: mod_base = OTHER; note = 2'-O-methoxy-ethyl modified nucleotide with phosphorothioate linkage
  modified_base 3: mod_base = OTHER; note = 2'-O-methoxy-ethyl modified nucleotide with phosphorothioate linkage
  modified_base 4: mod_base = OTHER; note = 2'-O-methoxy-ethyl modified nucleotide with phosphorothioate linkage
  modified_base 5: mod_base = OTHER; note = 2'-O-methoxy-ethyl modified thymine with phosphorothioate linkage
  modified_base 6: mod_base = OTHER; note = 2'-O-methoxy-ethyl modified nucleotide with phosphorothioate linkage
  modified_base 7: mod_base = OTHER; note = 2'-O-methoxy-ethyl modified nucleotide with phosphorothioate linkage
  modified_base 8: mod_base = OTHER; note = 2'-O-methoxy-ethyl modified nucleotide with phosphorothioate linkage
  modified_base 9: mod_base = OTHER; note = 2'-O-methoxy-ethyl modified nucleotide with phosphorothioate linkage
  modified_base 10: mod_base = OTHER; note = 2'-O-methoxy-ethyl modified nucleotide with phosphorothioate linkage
  modified_base 11: mod_base = OTHER; note = 2'-O-methoxy-ethyl modified nucleotide with phosphorothioate linkage
  modified_base 12: mod_base = OTHER; note = 2'-O-methoxy-ethyl modified nucleotide with phosphorothioate linkage
  modified_base 13: mod_base = OTHER; note = Locked thymine with phosphorothioate linkage
  modified_base 14: mod_base = OTHER; note = 2'-O-methoxy-ethyl modified nucleotide with phosphorothioate linkage
  modified_base 15: mod_base = OTHER; note = 2'-O-methoxy-ethyl modified nucleotide with phosphorothioate linkage
  modified_base 16: mod_base = OTHER; note = 2'-O-methoxy-ethyl modified nucleotide with phosphorothioate linkage
  modified_base 17: mod_base = OTHER; note = 2'-O-methoxy-ethyl modified nucleotide with phosphorothioate linkage
  modified_base 18: mod_base = OTHER; note = 2'-O-methoxy-ethyl modified nucleotide with phosphorothioate linkage
  modified_base 19: mod_base = OTHER; note = 2'-O-methoxy-ethyl modified nucleotide with phosphorothioate linkage
  modified_base 20: mod_base = OTHER; note = 2'-O-methoxy-ethyl modified nucleotide
aacgtacagaaatgggaggg

SEQ ID NO: 565 - RNA, 20 nt, synthetic construct
  source 1..20: mol_type = other RNA
  modified_base 1: mod_base = OTHER; note = 2'-O-methoxy-ethyl modified nucleotide with phosphorothioate linkage
  modified_base 2: mod_base = OTHER; note = 2'-O-methoxy-ethyl modified nucleotide with phosphorothioate linkage
  modified_base 3: mod_base = OTHER; note = 2'-O-methoxy-ethyl modified nucleotide with phosphorothioate linkage
  modified_base 4: mod_base = OTHER; note = 2'-O-methoxy-ethyl modified nucleotide with phosphorothioate linkage
  modified_base 5: mod_base = OTHER; note = 2'-O-methoxy-ethyl modified thymine with phosphorothioate linkage
  modified_base 6: mod_base = OTHER; note = 2'-O-methoxy-ethyl modified nucleotide with phosphorothioate linkage
  modified_base 7: mod_base = OTHER; note = 2'-O-methoxy-ethyl modified nucleotide with phosphorothioate linkage
  modified_base 8: mod_base = OTHER; note = 2'-O-methoxy-ethyl modified nucleotide with phosphorothioate linkage
  modified_base 9: mod_base = OTHER; note = 2'-O-methoxy-ethyl modified nucleotide with phosphorothioate linkage
  modified_base 10: mod_base = OTHER; note = 2'-O-methoxy-ethyl modified nucleotide with phosphorothioate linkage
  modified_base 11: mod_base = OTHER; note = 2'-O-methoxy-ethyl modified nucleotide with phosphorothioate linkage
  modified_base 12: mod_base = OTHER; note = 2'-O-methoxy-ethyl modified nucleotide with phosphorothioate linkage
  modified_base 13: mod_base = OTHER; note = 2'-O-methoxy-ethyl modified thymine with phosphorothioate linkage
  modified_base 14: mod_base = OTHER; note = Locked nucleotide with phosphorothioate linkage
  modified_base 15: mod_base = OTHER; note = 2'-O-methoxy-ethyl modified nucleotide with phosphorothioate linkage
  modified_base 16: mod_base = OTHER; note = 2'-O-methoxy-ethyl modified nucleotide with phosphorothioate linkage
  modified_base 17: mod_base = OTHER; note = 2'-O-methoxy-ethyl modified nucleotide with phosphorothioate linkage
  modified_base 18: mod_base = OTHER; note = 2'-O-methoxy-ethyl modified nucleotide with phosphorothioate linkage
  modified_base 19: mod_base = OTHER; note = 2'-O-methoxy-ethyl modified nucleotide with phosphorothioate linkage
  modified_base 20: mod_base = OTHER; note = 2'-O-methoxy-ethyl modified nucleotide
aacgtacagaaatgggaggg

SEQ ID NO: 566 - RNA, 20 nt, synthetic construct
  source 1..20: mol_type = other RNA
  modified_base 1: mod_base = OTHER; note = 2'-O-methoxy-ethyl modified nucleotide with phosphorothioate linkage
  modified_base 2: mod_base = OTHER; note = 2'-O-methoxy-ethyl modified nucleotide with phosphorothioate linkage
  modified_base 3: mod_base = OTHER; note = 2'-O-methoxy-ethyl modified nucleotide with phosphorothioate linkage
  modified_base 4: mod_base = OTHER; note = 2'-O-methoxy-ethyl modified nucleotide with phosphorothioate linkage
  modified_base 5: mod_base = OTHER; note = 2'-O-methoxy-ethyl modified thymine with phosphorothioate linkage
  modified_base 6: mod_base = OTHER; note = 2'-O-methoxy-ethyl modified nucleotide with phosphorothioate linkage
  modified_base 7: mod_base = OTHER; note = 2'-O-methoxy-ethyl modified nucleotide with phosphorothioate linkage
  modified_base 8: mod_base = OTHER; note = 2'-O-methoxy-ethyl modified nucleotide with phosphorothioate linkage
  modified_base 9: mod_base = OTHER; note = 2'-O-methoxy-ethyl modified nucleotide with phosphorothioate linkage
  modified_base 10: mod_base = OTHER; note = 2'-O-methoxy-ethyl modified nucleotide with phosphorothioate linkage
  modified_base 11: mod_base = OTHER; note = 2'-O-methoxy-ethyl modified nucleotide with phosphorothioate linkage
  modified_base 12: mod_base = OTHER; note = 2'-O-methoxy-ethyl modified nucleotide with phosphorothioate linkage
  modified_base 13: mod_base = OTHER; note = 2'-O-methoxy-ethyl modified thymine with phosphorothioate linkage
  modified_base 14: mod_base = OTHER; note = 2'-O-methoxy-ethyl modified nucleotide with phosphorothioate linkage
  modified_base 15: mod_base = OTHER; note = Locked nucleotide with phosphorothioate linkage
  modified_base 16: mod_base = OTHER; note = 2'-O-methoxy-ethyl modified nucleotide with phosphorothioate linkage
  modified_base 17: mod_base = OTHER; note = 2'-O-methoxy-ethyl modified nucleotide with phosphorothioate linkage
  modified_base 18: mod_base = OTHER; note = 2'-O-methoxy-ethyl modified nucleotide with phosphorothioate linkage
  modified_base 19: mod_base = OTHER; note = 2'-O-methoxy-ethyl modified nucleotide with phosphorothioate linkage
  modified_base 20: mod_base = OTHER; note = 2'-O-methoxy-ethyl modified nucleotide
aacgtacagaaatgggaggg

SEQ ID NO: 567 - RNA, 20 nt, synthetic construct
  source 1..20: mol_type = other RNA
  modified_base 1: mod_base = OTHER; note = 2'-O-methoxy-ethyl modified nucleotide with phosphorothioate linkage
  modified_base 2: mod_base = OTHER; note = 2'-O-methoxy-ethyl modified nucleotide with phosphorothioate linkage
  modified_base 3: mod_base = OTHER; note = 2'-O-methoxy-ethyl modified nucleotide with phosphorothioate linkage
  modified_base 4: mod_base = OTHER; note = 2'-O-methoxy-ethyl modified nucleotide with phosphorothioate linkage
  modified_base 5: mod_base = OTHER; note = 2'-O-methoxy-ethyl modified thymine with phosphorothioate linkage
  modified_base 6: mod_base = OTHER; note = 2'-O-methoxy-ethyl modified nucleotide with phosphorothioate linkage
  modified_base 7: mod_base = OTHER; note = 2'-O-methoxy-ethyl modified nucleotide with phosphorothioate linkage
  modified_base 8: mod_base = OTHER; note = 2'-O-methoxy-ethyl modified nucleotide with phosphorothioate linkage
  modified_base 9: mod_base = OTHER; note = 2'-O-methoxy-ethyl modified nucleotide with phosphorothioate linkage
  modified_base 10: mod_base = OTHER; note = 2'-O-methoxy-ethyl modified nucleotide with phosphorothioate linkage
  modified_base 11: mod_base = OTHER; note = 2'-O-methoxy-ethyl modified nucleotide with phosphorothioate linkage
  modified_base 12: mod_base = OTHER; note = 2'-O-methoxy-ethyl modified nucleotide with phosphorothioate linkage
  modified_base 13: mod_base = OTHER; note = 2'-O-methoxy-ethyl modified thymine with phosphorothioate linkage
  modified_base 14: mod_base = OTHER; note = 2'-O-methoxy-ethyl modified nucleotide with phosphorothioate linkage
  modified_base 15: mod_base = OTHER; note = 2'-O-methoxy-ethyl modified nucleotide with phosphorothioate linkage
  modified_base 16: mod_base = OTHER; note = Locked nucleotide with phosphorothioate linkage
  modified_base 17: mod_base = OTHER; note = 2'-O-methoxy-ethyl modified nucleotide with phosphorothioate linkage
  modified_base 18: mod_base = OTHER; note = 2'-O-methoxy-ethyl modified nucleotide with phosphorothioate linkage
  modified_base 19: mod_base = OTHER; note = 2'-O-methoxy-ethyl modified nucleotide with phosphorothioate linkage
  modified_base 20: mod_base = OTHER; note = 2'-O-methoxy-ethyl modified nucleotide
aacgtacagaaatgggaggg

SEQ ID NO: 568 - RNA, 20 nt, synthetic construct
  source 1..20: mol_type = other RNA
  modified_base 1: mod_base = OTHER; note = 2'-O-methoxy-ethyl modified nucleotide with phosphorothioate linkage
  modified_base 2: mod_base = OTHER; note = 2'-O-methoxy-ethyl modified nucleotide with phosphorothioate linkage
  modified_base 3: mod_base = OTHER; note = 2'-O-methoxy-ethyl modified nucleotide with phosphorothioate linkage
  modified_base 4: mod_base = OTHER; note = 2'-O-methoxy-ethyl modified nucleotide with phosphorothioate linkage
  modified_base 5: mod_base = OTHER; note = 2'-O-methoxy-ethyl modified thymine with phosphorothioate linkage
  modified_base 6: mod_base = OTHER; note = 2'-O-methoxy-ethyl modified nucleotide with phosphorothioate linkage
  modified_base 7: mod_base = OTHER; note = 2'-O-methoxy-ethyl modified nucleotide with phosphorothioate linkage
  modified_base 8: mod_base = OTHER; note = 2'-O-methoxy-ethyl modified nucleotide with phosphorothioate linkage
  modified_base 9: mod_base = OTHER; note = 2'-O-methoxy-ethyl modified nucleotide with phosphorothioate linkage
  modified_base 10: mod_base = OTHER; note = 2'-O-methoxy-ethyl modified nucleotide with phosphorothioate linkage
  modified_base 11: mod_base = OTHER; note = 2'-O-methoxy-ethyl modified nucleotide with phosphorothioate linkage
  modified_base 12: mod_base = OTHER; note = 2'-O-methoxy-ethyl modified nucleotide with phosphorothioate linkage
  modified_base 13: mod_base = OTHER; note = 2'-O-methoxy-ethyl modified thymine with phosphorothioate linkage
  modified_base 14: mod_base = OTHER; note = 2'-O-methoxy-ethyl modified nucleotide with phosphorothioate linkage
  modified_base 15: mod_base = OTHER; note = 2'-O-methoxy-ethyl modified nucleotide with phosphorothioate linkage
  modified_base 16: mod_base = OTHER; note = 2'-O-methoxy-ethyl modified nucleotide with phosphorothioate linkage
  modified_base 17: mod_base = OTHER; note = Locked nucleotide with phosphorothioate linkage
  modified_base 18: mod_base = OTHER; note = 2'-O-methoxy-ethyl modified nucleotide with phosphorothioate linkage
  modified_base 19: mod_base = OTHER; note = 2'-O-methoxy-ethyl modified nucleotide with phosphorothioate linkage
  modified_base 20: mod_base = OTHER; note = 2'-O-methoxy-ethyl modified nucleotide
aacgtacagaaatgggaggg

SEQ ID NO: 569 - RNA, 20 nt, synthetic construct
  source 1..20: mol_type = other RNA
  modified_base 1: mod_base = OTHER; note = 2'-O-methoxy-ethyl modified nucleotide with phosphorothioate linkage
  modified_base 2: mod_base = OTHER; note = 2'-O-methoxy-ethyl modified nucleotide with phosphorothioate linkage
  modified_base 3: mod_base = OTHER; note = 2'-O-methoxy-ethyl modified nucleotide with phosphorothioate linkage
  modified_base 4: mod_base = OTHER; note = 2'-O-methoxy-ethyl modified nucleotide with phosphorothioate linkage
  modified_base 5: mod_base = OTHER; note = 2'-O-methoxy-ethyl modified thymine with phosphorothioate linkage
  modified_base 6: mod_base = OTHER; note = 2'-O-methoxy-ethyl modified nucleotide with phosphorothioate linkage
  modified_base 7: mod_base = OTHER; note = 2'-O-methoxy-ethyl modified nucleotide with phosphorothioate linkage
  modified_base 8: mod_base = OTHER; note = 2'-O-methoxy-ethyl modified nucleotide with phosphorothioate linkage
  modified_base 9: mod_base = OTHER; note = 2'-O-methoxy-ethyl modified nucleotide with phosphorothioate linkage
  modified_base 10: mod_base = OTHER; note = 2'-O-methoxy-ethyl modified nucleotide with phosphorothioate linkage
  modified_base 11: mod_base = OTHER; note = 2'-O-methoxy-ethyl modified nucleotide with phosphorothioate linkage
  modified_base 12: mod_base = OTHER; note = 2'-O-methoxy-ethyl modified nucleotide with phosphorothioate linkage
  modified_base 13: mod_base = OTHER; note = 2'-O-methoxy-ethyl modified thymine with phosphorothioate linkage
  modified_base 14: mod_base = OTHER; note = 2'-O-methoxy-ethyl modified nucleotide with phosphorothioate linkage
  modified_base 15: mod_base = OTHER; note = 2'-O-methoxy-ethyl modified nucleotide with phosphorothioate linkage
  modified_base 16: mod_base = OTHER; note = 2'-O-methoxy-ethyl modified nucleotide with phosphorothioate linkage
  modified_base 17: mod_base = OTHER; note = 2'-O-methoxy-ethyl modified nucleotide with phosphorothioate linkage
  modified_base 18: mod_base = OTHER; note = Locked nucleotide with phosphorothioate linkage
  modified_base 19: mod_base = OTHER; note = 2'-O-methoxy-ethyl modified nucleotide with phosphorothioate linkage
  modified_base 20: mod_base = OTHER; note = 2'-O-methoxy-ethyl modified nucleotide
aacgtacagaaatgggaggg

SEQ ID NO: 570 - RNA, 20 nt, synthetic construct
  source 1..20: mol_type = other RNA
  modified_base 1: mod_base = OTHER; note = 2'-O-methoxy-ethyl modified nucleotide with phosphorothioate linkage
  modified_base 2: mod_base = OTHER; note = 2'-O-methoxy-ethyl modified nucleotide with phosphorothioate linkage
  modified_base 3: mod_base = OTHER; note = 2'-O-methoxy-ethyl modified nucleotide with phosphorothioate linkage
  modified_base 4: mod_base = OTHER; note = 2'-O-methoxy-ethyl modified nucleotide with phosphorothioate linkage
  modified_base 5: mod_base = OTHER; note = 2'-O-methoxy-ethyl modified thymine with phosphorothioate linkage
  modified_base 6: mod_base = OTHER; note = 2'-O-methoxy-ethyl modified nucleotide with phosphorothioate linkage
  modified_base 7: mod_base = OTHER; note = 2'-O-methoxy-ethyl modified nucleotide with phosphorothioate linkage
  modified_base 8: mod_base = OTHER; note = 2'-O-methoxy-ethyl modified nucleotide with phosphorothioate linkage
  modified_base 9: mod_base = OTHER; note = 2'-O-methoxy-ethyl modified nucleotide with phosphorothioate linkage
  modified_base 10: mod_base = OTHER; note = 2'-O-methoxy-ethyl modified nucleotide with phosphorothioate linkage
  modified_base 11: mod_base = OTHER; note = 2'-O-methoxy-ethyl modified nucleotide with phosphorothioate linkage
  modified_base 12: mod_base = OTHER; note = 2'-O-methoxy-ethyl modified nucleotide with phosphorothioate linkage
  modified_base 13: mod_base = OTHER; note = 2'-O-methoxy-ethyl modified thymine with phosphorothioate linkage
  modified_base 14: mod_base = OTHER; note = 2'-O-methoxy-ethyl modified nucleotide with phosphorothioate linkage
  modified_base 15: mod_base = OTHER; note = 2'-O-methoxy-ethyl modified nucleotide with phosphorothioate linkage
  modified_base 16: mod_base = OTHER; note = 2'-O-methoxy-ethyl modified nucleotide with phosphorothioate linkage
  modified_base 17: mod_base = OTHER; note = 2'-O-methoxy-ethyl modified nucleotide with phosphorothioate linkage
  modified_base 18: mod_base = OTHER; note = 2'-O-methoxy-ethyl modified nucleotide with phosphorothioate linkage
  modified_base 19: mod_base = OTHER; note = Locked nucleotide with phosphorothioate linkage
  modified_base 20: mod_base = OTHER; note = 2'-O-methoxy-ethyl modified nucleotide
aacgtacagaaatgggaggg

SEQ ID NO: 571 - RNA, 20 nt, synthetic construct
  source 1..20: mol_type = other RNA
  modified_base 1: mod_base = OTHER; note = 2'-O-methoxy-ethyl modified nucleotide with phosphorothioate linkage
  modified_base 2: mod_base = OTHER; note = 2'-O-methoxy-ethyl modified nucleotide with phosphorothioate linkage
  modified_base 3: mod_base = OTHER; note = 2'-O-methoxy-ethyl modified nucleotide with phosphorothioate linkage
  modified_base 4: mod_base = OTHER; note = 2'-O-methoxy-ethyl modified nucleotide with phosphorothioate linkage
  modified_base 5: mod_base = OTHER; note = 2'-O-methoxy-ethyl modified thymine with phosphorothioate linkage
  modified_base 6: mod_base = OTHER; note = 2'-O-methoxy-ethyl modified nucleotide with phosphorothioate linkage
  modified_base 7: mod_base = OTHER; note = 2'-O-methoxy-ethyl modified nucleotide with phosphorothioate linkage
  modified_base 8: mod_base = OTHER; note = 2'-O-methoxy-ethyl modified nucleotide with phosphorothioate linkage
  modified_base 9: mod_base = OTHER; note = 2'-O-methoxy-ethyl modified nucleotide with phosphorothioate linkage
  modified_base 10: mod_base = OTHER; note = 2'-O-methoxy-ethyl modified nucleotide with phosphorothioate linkage
  modified_base 11: mod_base = OTHER; note = 2'-O-methoxy-ethyl modified nucleotide with phosphorothioate linkage
  modified_base 12: mod_base = OTHER; note = 2'-O-methoxy-ethyl modified nucleotide with phosphorothioate linkage
  modified_base 13: mod_base = OTHER; note = 2'-O-methoxy-ethyl modified thymine with phosphorothioate linkage
  modified_base 14: mod_base = OTHER; note = 2'-O-methoxy-ethyl modified nucleotide with phosphorothioate linkage
  modified_base 15: mod_base = OTHER; note = 2'-O-methoxy-ethyl modified nucleotide with phosphorothioate linkage
  modified_base 16: mod_base = OTHER; note = 2'-O-methoxy-ethyl modified nucleotide with phosphorothioate linkage
  modified_base 17: mod_base = OTHER; note = 2'-O-methoxy-ethyl modified nucleotide with phosphorothioate linkage
  modified_base 18: mod_base = OTHER; note = 2'-O-methoxy-ethyl modified nucleotide with phosphorothioate linkage
  modified_base 19: mod_base = OTHER; note = 2'-O-methoxy-ethyl modified nucleotide with phosphorothioate linkage
  modified_base 20: mod_base = OTHER; note = Locked nucleotide
aacgtacagaaatgggaggg

SEQ ID NO: 572 - RNA, 20 nt, synthetic construct
  source 1..20: mol_type = other RNA
  modified_base 1: mod_base = OTHER; note = Locked nucleotide with phosphorothioate linkage
  modified_base 2: mod_base = OTHER; note = 2'-O-methoxy-ethyl modified nucleotide with phosphorothioate linkage
  modified_base 3: mod_base = OTHER; note = 2'-O-methoxy-ethyl modified nucleotide with phosphorothioate linkage
  modified_base 4: mod_base = OTHER; note = 2'-O-methoxy-ethyl modified nucleotide with phosphorothioate linkage
  modified_base 5: mod_base = OTHER; note = 2'-O-methoxy-ethyl modified thymine with phosphorothioate linkage
  modified_base 6: mod_base = OTHER; note = 2'-O-methoxy-ethyl modified nucleotide with phosphorothioate linkage
  modified_base 7: mod_base = OTHER; note = 2'-O-methoxy-ethyl modified nucleotide with phosphorothioate linkage
  modified_base 8: mod_base = OTHER; note = 2'-O-methoxy-ethyl modified nucleotide with phosphorothioate linkage
  modified_base 9: mod_base = OTHER; note = 2'-O-methoxy-ethyl modified nucleotide with phosphorothioate linkage
  modified_base 10: mod_base = OTHER; note = 2'-O-methoxy-ethyl modified nucleotide with phosphorothioate linkage
  modified_base 11: mod_base = OTHER; note = 2'-O-methoxy-ethyl modified nucleotide with phosphorothioate linkage
  modified_base 12: mod_base = OTHER; note = 2'-O-methoxy-ethyl modified nucleotide with phosphorothioate linkage
  modified_base 13: mod_base = OTHER; note = 2'-O-methoxy-ethyl modified thymine with phosphorothioate linkage
  modified_base 14: mod_base = OTHER; note = 2'-O-methoxy-ethyl modified nucleotide with phosphorothioate linkage
  modified_base 15: mod_base = OTHER; note = 2'-O-methoxy-ethyl modified nucleotide with phosphorothioate linkage
  modified_base 16: mod_base = OTHER; note = 2'-O-methoxy-ethyl modified nucleotide with phosphorothioate linkage
  modified_base 17: mod_base = OTHER; note = 2'-O-methoxy-ethyl modified nucleotide with phosphorothioate linkage
  modified_base 18: mod_base = OTHER; note = 2'-O-methoxy-ethyl modified nucleotide with phosphorothioate linkage
  modified_base 19: mod_base = OTHER; note = 2'-O-methoxy-ethyl modified nucleotide with phosphorothioate linkage
  modified_base 20: mod_base = OTHER; note = Locked nucleotide
aacgtacagaaatgggaggg

SEQ ID NO: 573 - RNA, 20 nt, synthetic construct
  source 1..20: mol_type = other RNA
  modified_base 1: mod_base = OTHER; note = 2'-O-methoxy-ethyl modified nucleotide with phosphorothioate linkage
  modified_base 2: mod_base = OTHER; note = Locked nucleotide with phosphorothioate linkage
  modified_base 3: mod_base = OTHER; note = 2'-O-methoxy-ethyl modified nucleotide with phosphorothioate linkage
  modified_base 4: mod_base = OTHER; note = 2'-O-methoxy-ethyl modified nucleotide with phosphorothioate linkage
  modified_base 5: mod_base = OTHER; note = 2'-O-methoxy-ethyl modified thymine with phosphorothioate linkage
  modified_base 6: mod_base = OTHER; note = 2'-O-methoxy-ethyl modified nucleotide with phosphorothioate linkage
  modified_base 7: mod_base = OTHER; note = 2'-O-methoxy-ethyl modified nucleotide with phosphorothioate linkage
  modified_base 8: mod_base = OTHER; note = 2'-O-methoxy-ethyl modified nucleotide with phosphorothioate linkage
  modified_base 9: mod_base = OTHER; note = 2'-O-methoxy-ethyl modified nucleotide with phosphorothioate linkage
  modified_base 10: mod_base = OTHER; note = 2'-O-methoxy-ethyl modified nucleotide with phosphorothioate linkage
  modified_base 11: mod_base = OTHER; note = 2'-O-methoxy-ethyl modified nucleotide with phosphorothioate linkage
  modified_base 12: mod_base = OTHER; note = 2'-O-methoxy-ethyl modified nucleotide with phosphorothioate linkage
  modified_base 13: mod_base = OTHER; note = 2'-O-methoxy-ethyl modified thymine with phosphorothioate linkage
  modified_base 14: mod_base = OTHER; note = 2'-O-methoxy-ethyl modified nucleotide with phosphorothioate linkage
  modified_base 15: mod_base = OTHER; note = 2'-O-methoxy-ethyl modified nucleotide with phosphorothioate linkage
  modified_base 16: mod_base = OTHER; note = 2'-O-methoxy-ethyl modified nucleotide with phosphorothioate linkage
  modified_base 17: mod_base = OTHER; note = 2'-O-methoxy-ethyl modified nucleotide with phosphorothioate linkage
  modified_base 18: mod_base = OTHER; note = 2'-O-methoxy-ethyl modified nucleotide with phosphorothioate linkage
  modified_base 19: mod_base = OTHER; note = Locked nucleotide with phosphorothioate linkage
  modified_base 20: mod_base = OTHER; note = 2'-O-methoxy-ethyl modified nucleotide
aacgtacagaaatgggaggg

SEQ ID NO: 574 - RNA, 20 nt, synthetic construct
  source 1..20: mol_type = other RNA
  modified_base 1: mod_base = OTHER; note = 2'-O-methoxy-ethyl modified nucleotide with phosphorothioate linkage
  modified_base 2: mod_base = OTHER; note = 2'-O-methoxy-ethyl modified nucleotide with phosphorothioate linkage
  modified_base 3: mod_base = OTHER; note = Locked nucleotide with phosphorothioate linkage
  modified_base 4: mod_base = OTHER; note = 2'-O-methoxy-ethyl modified nucleotide with phosphorothioate linkage
  modified_base 5: mod_base = OTHER; note = 2'-O-methoxy-ethyl modified thymine with phosphorothioate linkage
  modified_base 6: mod_base = OTHER; note = 2'-O-methoxy-ethyl modified nucleotide with phosphorothioate linkage
  modified_base 7: mod_base = OTHER; note = 2'-O-methoxy-ethyl modified nucleotide with phosphorothioate linkage
  modified_base 8: mod_base = OTHER; note = 2'-O-methoxy-ethyl modified nucleotide with phosphorothioate linkage
  modified_base 9: mod_base = OTHER; note = 2'-O-methoxy-ethyl modified nucleotide with phosphorothioate linkage
  modified_base 10: mod_base = OTHER; note = 2'-O-methoxy-ethyl modified nucleotide with phosphorothioate linkage
  modified_base 11: mod_base = OTHER; note = 2'-O-methoxy-ethyl modified nucleotide with phosphorothioate linkage
  modified_base 12: mod_base = OTHER; note = 2'-O-methoxy-ethyl modified nucleotide with phosphorothioate linkage
  modified_base 13: mod_base = OTHER; note = 2'-O-methoxy-ethyl modified thymine with phosphorothioate linkage
  modified_base 14: mod_base = OTHER; note = 2'-O-methoxy-ethyl modified nucleotide with phosphorothioate linkage
  modified_base 15: mod_base = OTHER; note = 2'-O-methoxy-ethyl modified nucleotide with phosphorothioate linkage
  modified_base 16: mod_base = OTHER; note = 2'-O-methoxy-ethyl modified nucleotide with phosphorothioate linkage
  modified_base 17: mod_base = OTHER; note = 2'-O-methoxy-ethyl modified nucleotide with phosphorothioate linkage
  modified_base 18: mod_base = OTHER; note = Locked nucleotide with phosphorothioate linkage
  modified_base 19: mod_base = OTHER; note = 2'-O-methoxy-ethyl modified nucleotide with phosphorothioate linkage
  modified_base 20: mod_base = OTHER; note = 2'-O-methoxy-ethyl modified nucleotide
aacgtacagaaatgggaggg

SEQ ID NO: 575 - RNA, 20 nt, synthetic construct
  source 1..20: mol_type = other RNA
  modified_base 1: mod_base = OTHER; note = 2'-O-methoxy-ethyl modified nucleotide with phosphorothioate linkage
  modified_base 2: mod_base = OTHER; note = 2'-O-methoxy-ethyl modified nucleotide with phosphorothioate linkage
  modified_base 3: mod_base = OTHER; note = 2'-O-methoxy-ethyl modified nucleotide with phosphorothioate linkage
  modified_base 4: mod_base = OTHER; note = Locked nucleotide with phosphorothioate linkage
  modified_base 5: mod_base = OTHER; note = 2'-O-methoxy-ethyl modified thymine with phosphorothioate linkage
  modified_base 6: mod_base = OTHER; note = 2'-O-methoxy-ethyl modified nucleotide with phosphorothioate linkage
  modified_base 7: mod_base = OTHER; note = 2'-O-methoxy-ethyl modified nucleotide with phosphorothioate linkage
  modified_base 8: mod_base = OTHER; note = 2'-O-methoxy-ethyl modified nucleotide with phosphorothioate linkage
  modified_base 9: mod_base = OTHER; note = 2'-O-methoxy-ethyl modified nucleotide with phosphorothioate linkage
  modified_base 10: mod_base = OTHER; note = 2'-O-methoxy-ethyl modified nucleotide with phosphorothioate linkage
  modified_base 11: mod_base = OTHER; note = 2'-O-methoxy-ethyl modified nucleotide with phosphorothioate linkage
  modified_base 12: mod_base = OTHER; note = 2'-O-methoxy-ethyl modified nucleotide with phosphorothioate linkage
  modified_base 13: mod_base = OTHER; note = 2'-O-methoxy-ethyl modified thymine with phosphorothioate linkage
  modified_base 14: mod_base = OTHER; note = 2'-O-methoxy-ethyl modified nucleotide with phosphorothioate linkage
  modified_base 15: mod_base = OTHER; note = 2'-O-methoxy-ethyl modified nucleotide with phosphorothioate linkage
  modified_base 16: mod_base = OTHER; note = 2'-O-methoxy-ethyl modified nucleotide with phosphorothioate linkage
  modified_base 17: mod_base = OTHER; note = Locked nucleotide with phosphorothioate linkage
  modified_base 18: mod_base = OTHER; note = 2'-O-methoxy-ethyl modified nucleotide with phosphorothioate linkage
  modified_base 19: mod_base = OTHER; note = 2'-O-methoxy-ethyl modified nucleotide with phosphorothioate linkage
  modified_base 20: mod_base = OTHER; note = 2'-O-methoxy-ethyl modified nucleotide
aacgtacagaaatgggaggg

SEQ ID NO: 576 - RNA, 20 nt, synthetic construct
  source 1..20: mol_type = other RNA
  modified_base 1: mod_base = OTHER; note = 2'-O-methoxy-ethyl modified nucleotide with phosphorothioate linkage
  modified_base 2: mod_base = OTHER; note = 2'-O-methoxy-ethyl modified nucleotide with phosphorothioate linkage
  modified_base 3: mod_base = OTHER; note = 2'-O-methoxy-ethyl modified nucleotide with phosphorothioate linkage
  modified_base 4: mod_base = OTHER; note = 2'-O-methoxy-ethyl modified nucleotide with phosphorothioate linkage
  modified_base 5: mod_base = OTHER; note = Locked thymine with phosphorothioate linkage
  modified_base 6: mod_base = OTHER; note = 2'-O-methoxy-ethyl modified nucleotide with phosphorothioate linkage
  modified_base 7: mod_base = OTHER; note = 2'-O-methoxy-ethyl modified nucleotide with phosphorothioate linkage
  modified_base 8: mod_base = OTHER; note = 2'-O-methoxy-ethyl modified nucleotide with phosphorothioate linkage
  modified_base 9: mod_base = OTHER; note = 2'-O-methoxy-ethyl modified nucleotide with phosphorothioate linkage
  modified_base 10: mod_base = OTHER; note = 2'-O-methoxy-ethyl modified nucleotide with phosphorothioate linkage
  modified_base 11: mod_base = OTHER; note = 2'-O-methoxy-ethyl modified nucleotide with phosphorothioate linkage
  modified_base 12: mod_base = OTHER; note = 2'-O-methoxy-ethyl modified nucleotide with phosphorothioate linkage
  modified_base 13: mod_base = OTHER; note = 2'-O-methoxy-ethyl modified thymine with phosphorothioate linkage
  modified_base 14: mod_base = OTHER; note = 2'-O-methoxy-ethyl modified nucleotide with phosphorothioate linkage
  modified_base 15: mod_base = OTHER; note = 2'-O-methoxy-ethyl modified nucleotide with phosphorothioate linkage
  modified_base 16: mod_base = OTHER; note = Locked nucleotide with phosphorothioate linkage
  modified_base 17: mod_base = OTHER; note = 2'-O-methoxy-ethyl modified nucleotide with phosphorothioate linkage
  modified_base 18: mod_base = OTHER; note = 2'-O-methoxy-ethyl modified nucleotide with phosphorothioate linkage
  modified_base 19: mod_base = OTHER; note = 2'-O-methoxy-ethyl modified nucleotide with phosphorothioate linkage
  modified_base 20: mod_base = OTHER; note = 2'-O-methoxy-ethyl modified nucleotide
aacgtacagaaatgggaggg

SEQ ID NO: 577 - RNA, 20 nt, synthetic construct
  source 1..20: mol_type = other RNA
  modified_base 1: mod_base = OTHER; note = 2'-O-methoxy-ethyl modified nucleotide with phosphorothioate linkage
  modified_base 2: mod_base = OTHER; note = 2'-O-methoxy-ethyl modified nucleotide with phosphorothioate linkage
  modified_base 3: mod_base = OTHER; note = 2'-O-methoxy-ethyl modified nucleotide with phosphorothioate linkage
  modified_base 4: mod_base = OTHER; note = 2'-O-methoxy-ethyl modified nucleotide with phosphorothioate linkage
  modified_base 5: mod_base = OTHER; note = 2'-O-methoxy-ethyl modified thymine with phosphorothioate linkage
  modified_base 6: mod_base = OTHER; note = Locked nucleotide with phosphorothioate linkage
  modified_base 7: mod_base = OTHER; note = 2'-O-methoxy-ethyl modified nucleotide with phosphorothioate linkage
  modified_base 8: mod_base = OTHER; note = 2'-O-methoxy-ethyl modified nucleotide with phosphorothioate linkage
  modified_base 9: mod_base = OTHER; note = 2'-O-methoxy-ethyl modified nucleotide with phosphorothioate linkage
  modified_base 10: mod_base = OTHER; note = 2'-O-methoxy-ethyl modified nucleotide with phosphorothioate linkage
  modified_base 11: mod_base = OTHER; note = 2'-O-methoxy-ethyl modified nucleotide with phosphorothioate linkage
  modified_base 12: mod_base = OTHER; note = 2'-O-methoxy-ethyl modified nucleotide with phosphorothioate linkage
  modified_base 13: mod_base = OTHER; note = 2'-O-methoxy-ethyl modified thymine with phosphorothioate linkage
  modified_base 14: mod_base = OTHER; note = 2'-O-methoxy-ethyl modified nucleotide with phosphorothioate linkage
  modified_base 15: mod_base = OTHER; note = Locked nucleotide with phosphorothioate linkage
  modified_base 16: mod_base = OTHER; note = 2'-O-methoxy-ethyl modified nucleotide with phosphorothioate linkage
  modified_base 17: mod_base = OTHER; note = 2'-O-methoxy-ethyl modified nucleotide with phosphorothioate linkage
  modified_base 18: mod_base = OTHER; note = 2'-O-methoxy-ethyl modified nucleotide with phosphorothioate linkage
  modified_base 19: mod_base = OTHER; note = 2'-O-methoxy-ethyl modified nucleotide with phosphorothioate linkage
  modified_base 20: mod_base = OTHER; note = 2'-O-methoxy-ethyl modified nucleotide
aacgtacagaaatgggaggg

SEQ ID NO: 578 - RNA, 20 nt, synthetic construct
  source 1..20: mol_type = other RNA
  modified_base 1: mod_base = OTHER; note = 2'-O-methoxy-ethyl modified nucleotide with phosphorothioate linkage
  modified_base 2: mod_base = OTHER; note = 2'-O-methoxy-ethyl modified nucleotide with phosphorothioate linkage
  modified_base 3: mod_base = OTHER; note = 2'-O-methoxy-ethyl modified nucleotide with phosphorothioate linkage
  modified_base 4: mod_base = OTHER; note = 2'-O-methoxy-ethyl modified nucleotide with phosphorothioate linkage
  modified_base 5: mod_base = OTHER; note = 2'-O-methoxy-ethyl modified thymine with phosphorothioate linkage
  modified_base 6: mod_base = OTHER; note = 2'-O-methoxy-ethyl modified nucleotide with phosphorothioate linkage
  modified_base 7: mod_base = OTHER; note = Locked nucleotide with phosphorothioate linkage
  modified_base 8: mod_base = OTHER; note = 2'-O-methoxy-ethyl modified nucleotide with phosphorothioate linkage
  modified_base 9: mod_base = OTHER; note = 2'-O-methoxy-ethyl modified nucleotide with phosphorothioate linkage
  modified_base 10: mod_base = OTHER; note = 2'-O-methoxy-ethyl modified nucleotide with phosphorothioate linkage
  modified_base 11: mod_base = OTHER; note = 2'-O-methoxy-ethyl modified nucleotide with phosphorothioate linkage
  modified_base 12: mod_base = OTHER; note = 2'-O-methoxy-ethyl modified nucleotide with phosphorothioate linkage
  modified_base 13: mod_base = OTHER; note = 2'-O-methoxy-ethyl modified thymine with phosphorothioate linkage
  modified_base 14: mod_base = OTHER; note = Locked nucleotide with phosphorothioate linkage
  modified_base 15: mod_base = OTHER; note = 2'-O-methoxy-ethyl modified nucleotide with phosphorothioate linkage
  modified_base 16: mod_base = OTHER; note = 2'-O-methoxy-ethyl modified nucleotide with phosphorothioate linkage
  modified_base 17: mod_base = OTHER; note = 2'-O-methoxy-ethyl modified nucleotide with phosphorothioate linkage
  modified_base 18: mod_base = OTHER; note = 2'-O-methoxy-ethyl modified nucleotide with phosphorothioate linkage
  modified_base 19: mod_base = OTHER; note = 2'-O-methoxy-ethyl modified nucleotide with phosphorothioate linkage
  modified_base 20: mod_base = OTHER; note = 2'-O-methoxy-ethyl modified nucleotide
aacgtacagaaatgggaggg

SEQ ID NO: 579 - RNA, 20 nt, synthetic construct
  source 1..20: mol_type = other RNA
  modified_base 1: mod_base = OTHER; note = 2'-O-methoxy-ethyl modified nucleotide with phosphorothioate linkage
  modified_base 2: mod_base = OTHER; note = 2'-O-methoxy-ethyl modified nucleotide with phosphorothioate linkage
  modified_base 3: mod_base = OTHER; note = 2'-O-methoxy-ethyl modified nucleotide with phosphorothioate linkage
  modified_base 4: mod_base = OTHER; note = 2'-O-methoxy-ethyl modified nucleotide with phosphorothioate linkage
  modified_base 5: mod_base = OTHER; note = 2'-O-methoxy-ethyl modified thymine with phosphorothioate linkage
  modified_base 6: mod_base = OTHER; note = 2'-O-methoxy-ethyl modified nucleotide with phosphorothioate linkage
  modified_base 7: mod_base = OTHER; note = 2'-O-methoxy-ethyl modified nucleotide with phosphorothioate linkage
  modified_base 8: mod_base = OTHER; note = Locked nucleotide with phosphorothioate linkage
  modified_base 9: mod_base = OTHER; note = 2'-O-methoxy-ethyl modified nucleotide with phosphorothioate linkage
  modified_base 10: mod_base = OTHER; note = 2'-O-methoxy-ethyl modified nucleotide with phosphorothioate linkage
  modified_base 11: mod_base = OTHER; note = 2'-O-methoxy-ethyl modified nucleotide with phosphorothioate linkage
  modified_base 12: mod_base = OTHER; note = 2'-O-methoxy-ethyl modified nucleotide with phosphorothioate linkage
  modified_base 13: mod_base = OTHER; note = Locked thymine with phosphorothioate linkage
  modified_base 14: mod_base = OTHER; note = 2'-O-methoxy-ethyl modified nucleotide with phosphorothioate linkage
  modified_base 15: mod_base = OTHER; note = 2'-O-methoxy-ethyl modified nucleotide with phosphorothioate linkage
  modified_base 16: mod_base = OTHER; note = 2'-O-methoxy-ethyl modified nucleotide with phosphorothioate linkage
  modified_base 17: mod_base = OTHER; note = 2'-O-methoxy-ethyl modified nucleotide with phosphorothioate linkage
  modified_base 18: mod_base = OTHER; note = 2'-O-methoxy-ethyl modified nucleotide with phosphorothioate linkage
  modified_base 19: mod_base = OTHER; note = 2'-O-methoxy-ethyl modified nucleotide with phosphorothioate linkage
  modified_base 20: mod_base = OTHER; note = 2'-O-methoxy-ethyl modified nucleotide
aacgtacagaaatgggaggg

SEQ ID NO: 580 - RNA, 20 nt, synthetic construct
  source 1..20: mol_type = other RNA
  modified_base 1: mod_base = OTHER; note = 2'-O-methoxy-ethyl modified nucleotide with phosphorothioate linkage
  modified_base 2: mod_base = OTHER; note = 2'-O-methoxy-ethyl modified nucleotide with phosphorothioate linkage
  modified_base 3: mod_base = OTHER; note = 2'-O-methoxy-ethyl modified nucleotide with phosphorothioate linkage
  modified_base 4: mod_base = OTHER; note = 2'-O-methoxy-ethyl modified nucleotide with phosphorothioate linkage
  modified_base 5: mod_base = OTHER; note = 2'-O-methoxy-ethyl modified thymine with phosphorothioate linkage
  modified_base 6: mod_base = OTHER; note = 2'-O-methoxy-ethyl modified nucleotide with phosphorothioate linkage
  modified_base 7: mod_base = OTHER; note = 2'-O-methoxy-ethyl modified nucleotide with phosphorothioate linkage
  modified_base 8: mod_base = OTHER; note = 2'-O-methoxy-ethyl modified nucleotide with phosphorothioate linkage
  modified_base 9: mod_base = OTHER; note = Locked nucleotide with phosphorothioate linkage
  modified_base 10: mod_base = OTHER; note = 2'-O-methoxy-ethyl modified nucleotide with phosphorothioate linkage
  modified_base 11: mod_base = OTHER; note = 2'-O-methoxy-ethyl modified nucleotide with phosphorothioate linkage
  modified_base 12: mod_base = OTHER; note = Locked nucleotide with phosphorothioate linkage
  modified_base 13: mod_base = OTHER; note = 2'-O-methoxy-ethyl modified thymine with phosphorothioate linkage
  modified_base 14: mod_base = OTHER; note = 2'-O-methoxy-ethyl modified nucleotide with phosphorothioate linkage
  modified_base 15: mod_base = OTHER; note = 2'-O-methoxy-ethyl modified nucleotide with phosphorothioate linkage
  modified_base 16: mod_base = OTHER; note = 2'-O-methoxy-ethyl modified nucleotide with phosphorothioate linkage
  modified_base 17: mod_base = OTHER; note = 2'-O-methoxy-ethyl modified nucleotide with phosphorothioate linkage
  modified_base 18: mod_base = OTHER; note = 2'-O-methoxy-ethyl modified nucleotide with phosphorothioate linkage
  modified_base 19: mod_base = OTHER; note = 2'-O-methoxy-ethyl modified nucleotide with phosphorothioate linkage
  modified_base 20: mod_base = OTHER; note = 2'-O-methoxy-ethyl modified nucleotide
aacgtacagaaatgggaggg

SEQ ID NO: 581 - RNA, 20 nt, synthetic construct
  source 1..20: mol_type = other RNA
  modified_base 1: mod_base = OTHER; note = 2'-O-methoxy-ethyl modified nucleotide with phosphorothioate linkage
  modified_base 2: mod_base = OTHER; note = 2'-O-methoxy-ethyl modified nucleotide with phosphorothioate linkage
  modified_base 3: mod_base = OTHER; note = 2'-O-methoxy-ethyl modified nucleotide with phosphorothioate linkage
  modified_base 4: mod_base = OTHER; note = 2'-O-methoxy-ethyl modified nucleotide with phosphorothioate linkage
  modified_base 5: mod_base = OTHER; note = 2'-O-methoxy-ethyl modified thymine with phosphorothioate linkage
  modified_base 6: mod_base = OTHER; note = 2'-O-methoxy-ethyl modified nucleotide with phosphorothioate linkage
  modified_base 7: mod_base = OTHER; note = 2'-O-methoxy-ethyl modified nucleotide with phosphorothioate linkage
  modified_base 8: mod_base = OTHER; note = 2'-O-methoxy-ethyl modified nucleotide with phosphorothioate linkage
  modified_base 9: mod_base = OTHER; note = 2'-O-methoxy-ethyl modified nucleotide with phosphorothioate linkage
  modified_base 10: mod_base = OTHER; note = Locked nucleotide with phosphorothioate linkage
  modified_base 11: mod_base = OTHER; note = Locked nucleotide with phosphorothioate linkage
  modified_base 12: mod_base = OTHER; note = 2'-O-methoxy-ethyl modified nucleotide with phosphorothioate linkage
  modified_base 13: mod_base = OTHER; note = 2'-O-methoxy-ethyl modified thymine with phosphorothioate linkage
  modified_base 14: mod_base = OTHER; note = 2'-O-methoxy-ethyl modified nucleotide with phosphorothioate linkage
  modified_base 15: mod_base = OTHER; note = 2'-O-methoxy-ethyl modified nucleotide with phosphorothioate linkage
  modified_base 16: mod_base = OTHER; note = 2'-O-methoxy-ethyl modified nucleotide with phosphorothioate linkage
  modified_base 17: mod_base = OTHER; note = 2'-O-methoxy-ethyl modified nucleotide with phosphorothioate linkage
  modified_base 18: mod_base = OTHER; note = 2'-O-methoxy-ethyl modified nucleotide with phosphorothioate linkage
  modified_base 19: mod_base = OTHER; note = 2'-O-methoxy-ethyl modified nucleotide with phosphorothioate linkage
  modified_base 20: mod_base = OTHER; note = 2'-O-methoxy-ethyl modified nucleotide
aacgtacagaaatgggaggg

SEQ ID NO: 582 - RNA, 20 nt, synthetic construct
  source 1..20: mol_type = other RNA
  modified_base 1: mod_base = OTHER; note = 2'-O-methoxy-ethyl modified nucleotide with phosphorothioate linkage
  modified_base 2: mod_base = OTHER; note = 2'-O-methoxy-ethyl modified nucleotide
  modified_base 3: mod_base = OTHER; note = 2'-O-methoxy-ethyl modified nucleotide with phosphorothioate linkage
  modified_base 4: mod_base = OTHER; note = 2'-O-methoxy-ethyl modified nucleotide with phosphorothioate linkage
  modified_base 5: mod_base = OTHER; note = 2'-O-methoxy-ethyl modified thymine with phosphorothioate linkage
  modified_base 6: mod_base = OTHER; note = 2'-O-methoxy-ethyl modified nucleotide with phosphorothioate linkage
  modified_base 7: mod_base = OTHER; note = 2'-O-methoxy-ethyl modified nucleotide with phosphorothioate linkage
  modified_base 8: mod_base = OTHER; note = 2'-O-methoxy-ethyl modified nucleotide with phosphorothioate linkage
  modified_base 9: mod_base = OTHER; note = 2'-O-methoxy-ethyl modified nucleotide with phosphorothioate linkage
  modified_base 10: mod_base = OTHER; note = 2'-O-methoxy-ethyl modified nucleotide with phosphorothioate linkage
  modified_base 11: mod_base = OTHER; note = 2'-O-methoxy-ethyl modified nucleotide with phosphorothioate linkage
  modified_base 12: mod_base = OTHER; note = 2'-O-methoxy-ethyl modified nucleotide with phosphorothioate linkage
  modified_base 13: mod_base = OTHER; note = 2'-O-methoxy-ethyl modified thymine with phosphorothioate linkage
  modified_base 14: mod_base = OTHER; note = 2'-O-methoxy-ethyl modified nucleotide with phosphorothioate linkage
  modified_base 15: mod_base = OTHER; note = 2'-O-methoxy-ethyl modified nucleotide with phosphorothioate linkage
  modified_base 16: mod_base = OTHER; note = 2'-O-methoxy-ethyl modified nucleotide with phosphorothioate linkage
  modified_base 17: mod_base = OTHER; note = 2'-O-methoxy-ethyl modified nucleotide with phosphorothioate linkage
  modified_base 18: mod_base = OTHER; note = 2'-O-methoxy-ethyl modified nucleotide with phosphorothioate linkage
  modified_base 19: mod_base = OTHER; note = 2'-O-methoxy-ethyl modified nucleotide with phosphorothioate linkage
  modified_base 20: mod_base = OTHER; note = 2'-O-methoxy-ethyl modified nucleotide
aacgtacagaaatgggaggg

SEQ ID NO: 583 - RNA, 20 nt, synthetic construct
  source 1..20: mol_type = other RNA
  modified_base 1: mod_base = OTHER; note = 2'-O-methoxy-ethyl modified nucleotide with phosphorothioate linkage
  modified_base 2: mod_base = OTHER; note = 2'-O-methoxy-ethyl modified nucleotide with phosphorothioate linkage
  modified_base 3: mod_base = OTHER; note = 2'-O-methoxy-ethyl modified nucleotide
  modified_base 4: mod_base = OTHER; note = 2'-O-methoxy-ethyl modified nucleotide with phosphorothioate linkage
  modified_base 5: mod_base = OTHER; note = 2'-O-methoxy-ethyl modified thymine with phosphorothioate linkage
  modified_base 6: mod_base = OTHER; note = 2'-O-methoxy-ethyl modified nucleotide with phosphorothioate linkage
  modified_base 7: mod_base = OTHER; note = 2'-O-methoxy-ethyl modified nucleotide with phosphorothioate linkage
  modified_base 8: mod_base = OTHER; note = 2'-O-methoxy-ethyl modified nucleotide with phosphorothioate linkage
  modified_base 9: mod_base = OTHER; note = 2'-O-methoxy-ethyl modified nucleotide with phosphorothioate linkage
  modified_base 10: mod_base = OTHER; note = 2'-O-methoxy-ethyl modified nucleotide with phosphorothioate linkage
  modified_base 11: mod_base = OTHER; note = 2'-O-methoxy-ethyl modified nucleotide with phosphorothioate linkage
  modified_base 12: mod_base = OTHER; note = 2'-O-methoxy-ethyl modified nucleotide with phosphorothioate linkage
  modified_base 13: mod_base = OTHER; note = 2'-O-methoxy-ethyl modified thymine with phosphorothioate linkage
  modified_base 14: mod_base = OTHER; note = 2'-O-methoxy-ethyl modified nucleotide with phosphorothioate linkage
  modified_base 15: mod_base = OTHER; note = 2'-O-methoxy-ethyl modified nucleotide with phosphorothioate linkage
  modified_base 16: mod_base = OTHER; note = 2'-O-methoxy-ethyl modified nucleotide with phosphorothioate linkage
  modified_base 17: mod_base = OTHER; note = 2'-O-methoxy-ethyl modified nucleotide with phosphorothioate linkage
  modified_base 18: mod_base = OTHER; note = 2'-O-methoxy-ethyl modified nucleotide with phosphorothioate linkage
  modified_base 19: mod_base = OTHER; note = 2'-O-methoxy-ethyl modified nucleotide with phosphorothioate linkage
  modified_base 20: mod_base = OTHER; note = 2'-O-methoxy-ethyl modified nucleotide
aacgtacagaaatgggaggg

SEQ ID NO: 584 - RNA, 20 nt, synthetic construct
  source 1..20: mol_type = other RNA
  modified_base 1: mod_base = OTHER; note = 2'-O-methoxy-ethyl modified nucleotide with phosphorothioate linkage
  modified_base 2: mod_base = OTHER; note = 2'-O-methoxy-ethyl modified nucleotide with phosphorothioate linkage
  modified_base 3: mod_base = OTHER; note = 2'-O-methoxy-ethyl modified nucleotide with phosphorothioate linkage
  modified_base 4: mod_base = OTHER; note = 2'-O-methoxy-ethyl modified nucleotide
  modified_base 5: mod_base = OTHER; note = 2'-O-methoxy-ethyl modified thymine with phosphorothioate linkage
  modified_base 6: mod_base = OTHER; note = 2'-O-methoxy-ethyl modified nucleotide with phosphorothioate linkage
  modified_base 7: mod_base = OTHER; note = 2'-O-methoxy-ethyl modified nucleotide with phosphorothioate linkage
  modified_base 8: mod_base = OTHER; note = 2'-O-methoxy-ethyl modified nucleotide with phosphorothioate linkage
  modified_base 9: mod_base = OTHER; note = 2'-O-methoxy-ethyl modified nucleotide with phosphorothioate linkage
  modified_base 10: mod_base = OTHER; note = 2'-O-methoxy-ethyl modified nucleotide with phosphorothioate linkage
  modified_base 11: mod_base = OTHER; note = 2'-O-methoxy-ethyl modified nucleotide with phosphorothioate linkage
  modified_base 12: mod_base = OTHER; note = 2'-O-methoxy-ethyl modified nucleotide with phosphorothioate linkage
  modified_base 13: mod_base = OTHER; note = 2'-O-methoxy-ethyl modified thymine with phosphorothioate linkage
  modified_base 14: mod_base = OTHER; note = 2'-O-methoxy-ethyl modified nucleotide with phosphorothioate linkage
  modified_base 15: mod_base = OTHER; note = 2'-O-methoxy-ethyl modified nucleotide with phosphorothioate linkage
  modified_base 16: mod_base = OTHER; note = 2'-O-methoxy-ethyl modified nucleotide with phosphorothioate linkage
  modified_base 17: mod_base = OTHER; note = 2'-O-methoxy-ethyl modified nucleotide with phosphorothioate linkage
  modified_base 18: mod_base = OTHER; note = 2'-O-methoxy-ethyl modified nucleotide with phosphorothioate linkage
  modified_base 19: mod_base = OTHER; note = 2'-O-methoxy-ethyl modified nucleotide with phosphorothioate linkage
  modified_base 20: mod_base = OTHER; note = 2'-O-methoxy-ethyl modified nucleotide
aacgtacagaaatgggaggg

SEQ ID NO: 585 - RNA, 20 nt, synthetic construct
  source 1..20: mol_type = other RNA
  modified_base 1: mod_base = OTHER; note = 2'-O-methoxy-ethyl modified nucleotide with phosphorothioate linkage
  modified_base 2: mod_base = OTHER; note = 2'-O-methoxy-ethyl modified nucleotide with phosphorothioate linkage
  modified_base 3: mod_base = OTHER; note = 2'-O-methoxy-ethyl modified nucleotide with phosphorothioate linkage
  modified_base 4: mod_base = OTHER; note = 2'-O-methoxy-ethyl modified nucleotide with phosphorothioate linkage
  modified_base 5: mod_base = OTHER; note = 2'-O-methoxy-ethyl modified thymine
  modified_base 6: mod_base = OTHER; note = 2'-O-methoxy-ethyl modified nucleotide with phosphorothioate linkage
  modified_base 7: mod_base = OTHER; note = 2'-O-methoxy-ethyl modified nucleotide with phosphorothioate linkage
  modified_base 8: mod_base = OTHER; note = 2'-O-methoxy-ethyl modified nucleotide with phosphorothioate linkage
  modified_base 9: mod_base = OTHER; note = 2'-O-methoxy-ethyl modified nucleotide with phosphorothioate linkage
  modified_base 10: mod_base = OTHER; note = 2'-O-methoxy-ethyl modified nucleotide with phosphorothioate linkage
  modified_base 11: mod_base = OTHER; note = 2'-O-methoxy-ethyl modified nucleotide with phosphorothioate linkage
  modified_base 12: mod_base = OTHER; note = 2'-O-methoxy-ethyl modified nucleotide with phosphorothioate linkage
  modified_base 13: mod_base = OTHER; note = 2'-O-methoxy-ethyl modified thymine with phosphorothioate linkage
  modified_base 14: mod_base = OTHER; note = 2'-O-methoxy-ethyl modified nucleotide with phosphorothioate linkage
  modified_base 15: mod_base = OTHER; note = 2'-O-methoxy-ethyl modified nucleotide with phosphorothioate linkage
  modified_base 16: mod_base = OTHER; note = 2'-O-methoxy-ethyl modified nucleotide with phosphorothioate linkage
  modified_base 17: mod_base = OTHER; note = 2'-O-methoxy-ethyl modified nucleotide with phosphorothioate linkage
  modified_base 18: mod_base = OTHER; note = 2'-O-methoxy-ethyl modified nucleotide with phosphorothioate linkage
  modified_base 19: mod_base = OTHER; note = 2'-O-methoxy-ethyl modified nucleotide with phosphorothioate linkage
  modified_base 20: mod_base = OTHER; note = 2'-O-methoxy-ethyl modified nucleotide
aacgtacagaaatgggaggg

SEQ ID NO: 586 - RNA, 20 nt, synthetic construct
  source 1..20: mol_type = other RNA
  modified_base 1: mod_base = OTHER; note = 2'-O-methoxy-ethyl modified nucleotide with phosphorothioate linkage
  modified_base 2: mod_base = OTHER; note = 2'-O-methoxy-ethyl modified nucleotide with phosphorothioate linkage
  modified_base 3: mod_base = OTHER; note = 2'-O-methoxy-ethyl modified nucleotide with phosphorothioate linkage
  modified_base 4: mod_base = OTHER; note = 2'-O-methoxy-ethyl modified nucleotide with phosphorothioate linkage
  modified_base 5: mod_base = OTHER; note = 2'-O-methoxy-ethyl modified thymine with phosphorothioate linkage
  modified_base 6: mod_base = OTHER; note = 2'-O-methoxy-ethyl modified nucleotide
  modified_base 7: mod_base = OTHER; note = 2'-O-methoxy-ethyl modified nucleotide with phosphorothioate linkage
  modified_base 8: mod_base = OTHER; note = 2'-O-methoxy-ethyl modified nucleotide with phosphorothioate linkage
  modified_base 9: mod_base = OTHER; note = 2'-O-methoxy-ethyl modified nucleotide with phosphorothioate linkage
  modified_base 10: mod_base = OTHER; note = 2'-O-methoxy-ethyl modified nucleotide with phosphorothioate linkage
  modified_base 11: mod_base = OTHER; note = 2'-O-methoxy-ethyl modified nucleotide with phosphorothioate linkage
  modified_base 12: mod_base = OTHER; note = 2'-O-methoxy-ethyl modified nucleotide with phosphorothioate linkage
  modified_base 13: mod_base = OTHER; note = 2'-O-methoxy-ethyl modified thymine with phosphorothioate linkage
  modified_base 14: mod_base = OTHER; note = 2'-O-methoxy-ethyl modified nucleotide with phosphorothioate linkage
  modified_base 15: mod_base = OTHER; note = 2'-O-methoxy-ethyl modified nucleotide with phosphorothioate linkage
  modified_base 16: mod_base = OTHER; note = 2'-O-methoxy-ethyl modified nucleotide with phosphorothioate linkage
  modified_base 17: mod_base = OTHER; note = 2'-O-methoxy-ethyl modified nucleotide with phosphorothioate linkage
  modified_base 18: mod_base = OTHER; note = 2'-O-methoxy-ethyl modified nucleotide with phosphorothioate linkage
  modified_base 19: mod_base = OTHER; note = 2'-O-methoxy-ethyl modified nucleotide with phosphorothioate linkage
  modified_base 20: mod_base = OTHER; note = 2'-O-methoxy-ethyl modified nucleotide
aacgtacagaaatgggaggg

SEQ ID NO: 587 - RNA, 20 nt, synthetic construct
  source 1..20: mol_type = other RNA
  modified_base 1: mod_base = OTHER; note = 2'-O-methoxy-ethyl modified nucleotide with phosphorothioate linkage
  modified_base 2: mod_base = OTHER; note = 2'-O-methoxy-ethyl modified nucleotide with phosphorothioate linkage
  modified_base 3: mod_base = OTHER; note = 2'-O-methoxy-ethyl modified nucleotide with phosphorothioate linkage
  modified_base 4: mod_base = OTHER; note = 2'-O-methoxy-ethyl modified nucleotide with phosphorothioate linkage
  modified_base 5: mod_base = OTHER; note = 2'-O-methoxy-ethyl modified thymine with phosphorothioate linkage
  modified_base 6: mod_base = OTHER; note = 2'-O-methoxy-ethyl modified nucleotide with phosphorothioate linkage
  modified_base 7: mod_base = OTHER; note = 2'-O-methoxy-ethyl modified nucleotide
  modified_base 8: mod_base = OTHER; note = 2'-O-methoxy-ethyl modified nucleotide with phosphorothioate linkage
  modified_base 9: mod_base = OTHER; note = 2'-O-methoxy-ethyl modified nucleotide with phosphorothioate linkage
  modified_base 10: mod_base = OTHER; note = 2'-O-methoxy-ethyl modified nucleotide with phosphorothioate linkage
  modified_base 11: mod_base = OTHER; note = 2'-O-methoxy-ethyl modified nucleotide with phosphorothioate linkage
  modified_base 12: mod_base = OTHER; note = 2'-O-methoxy-ethyl modified nucleotide with phosphorothioate linkage
  modified_base 13: mod_base = OTHER; note = 2'-O-methoxy-ethyl modified thymine with phosphorothioate linkage
  modified_base 14: mod_base = OTHER; note = 2'-O-methoxy-ethyl modified nucleotide with phosphorothioate linkage
  modified_base 15: mod_base = OTHER; note = 2'-O-methoxy-ethyl modified nucleotide with phosphorothioate linkage
  modified_base 16: mod_base = OTHER; note = 2'-O-methoxy-ethyl modified nucleotide with phosphorothioate linkage
  modified_base 17: mod_base = OTHER; note = 2'-O-methoxy-ethyl modified nucleotide with phosphorothioate linkage
  modified_base 18: mod_base = OTHER; note = 2'-O-methoxy-ethyl modified nucleotide with phosphorothioate linkage
  modified_base 19: mod_base = OTHER; note = 2'-O-methoxy-ethyl modified nucleotide with phosphorothioate linkage
  modified_base 20: mod_base = OTHER; note = 2'-O-methoxy-ethyl modified nucleotide
aacgtacagaaatgggaggg

SEQ ID NO: 588 - RNA, 20 nt, synthetic construct
  source 1..20: mol_type = other RNA
  modified_base 1: mod_base = OTHER; note = 2'-O-methoxy-ethyl modified nucleotide with phosphorothioate linkage
  modified_base 2: mod_base = OTHER; note = 2'-O-methoxy-ethyl modified nucleotide with phosphorothioate linkage
  modified_base 3: mod_base = OTHER; note = 2'-O-methoxy-ethyl modified nucleotide with phosphorothioate linkage
  modified_base 4: mod_base = OTHER; note = 2'-O-methoxy-ethyl modified nucleotide with phosphorothioate linkage
  modified_base 5: mod_base = OTHER; note = 2'-O-methoxy-ethyl modified thymine with phosphorothioate linkage
  modified_base 6: mod_base = OTHER; note = 2'-O-methoxy-ethyl modified nucleotide with phosphorothioate linkage
  modified_base 7: mod_base = OTHER; note = 2'-O-methoxy-ethyl modified nucleotide with phosphorothioate linkage
  modified_base 8: mod_base = OTHER; note = 2'-O-methoxy-ethyl modified nucleotide
  modified_base 9: mod_base = OTHER; note = 2'-O-methoxy-ethyl modified nucleotide with phosphorothioate linkage
  modified_base 10: mod_base = OTHER; note = 2'-O-methoxy-ethyl modified nucleotide with phosphorothioate linkage
  modified_base 11: mod_base = OTHER; note = 2'-O-methoxy-ethyl modified nucleotide with phosphorothioate linkage
  modified_base 12: mod_base = OTHER; note = 2'-O-methoxy-ethyl modified nucleotide with phosphorothioate linkage
  modified_base 13: mod_base = OTHER; note = 2'-O-methoxy-ethyl modified thymine with phosphorothioate linkage
  modified_base 14: mod_base = OTHER; note = 2'-O-methoxy-ethyl modified nucleotide with phosphorothioate linkage
  modified_base 15: mod_base = OTHER; note = 2'-O-methoxy-ethyl modified nucleotide with phosphorothioate linkage
  modified_base 16: mod_base = OTHER; note = 2'-O-methoxy-ethyl modified nucleotide with phosphorothioate linkage
  modified_base 17: mod_base = OTHER; note = 2'-O-methoxy-ethyl modified nucleotide with phosphorothioate linkage
  modified_base 18: mod_base = OTHER; note = 2'-O-methoxy-ethyl modified nucleotide with phosphorothioate linkage
  modified_base 19: mod_base = OTHER; note = 2'-O-methoxy-ethyl modified nucleotide with phosphorothioate linkage
  modified_base 20: mod_base = OTHER; note = 2'-O-methoxy-ethyl modified nucleotide
aacgtacagaaatgggaggg

SEQ ID NO: 589 - RNA, 20 nt, synthetic construct
  source 1..20: mol_type = other RNA
  modified_base 1: mod_base = OTHER; note = 2'-O-methoxy-ethyl modified nucleotide with phosphorothioate linkage
  modified_base 2: mod_base = OTHER; note = 2'-O-methoxy-ethyl modified nucleotide with phosphorothioate linkage
  modified_base 3: mod_base = OTHER; note = 2'-O-methoxy-ethyl modified nucleotide with phosphorothioate linkage
  modified_base 4: mod_base = OTHER; note = 2'-O-methoxy-ethyl modified nucleotide with phosphorothioate linkage
  modified_base 5: mod_base = OTHER; note = 2'-O-methoxy-ethyl modified thymine with phosphorothioate linkage
  modified_base 6: mod_base = OTHER; note = 2'-O-methoxy-ethyl modified nucleotide with phosphorothioate linkage
  modified_base 7: mod_base = OTHER; note = 2'-O-methoxy-ethyl modified nucleotide with phosphorothioate linkage
  modified_base 8: mod_base = OTHER; note = 2'-O-methoxy-ethyl modified nucleotide with phosphorothioate linkage
  modified_base 9: mod_base = OTHER; note = 2'-O-methoxy-ethyl modified nucleotide
  modified_base 10: mod_base = OTHER; note = 2'-O-methoxy-ethyl modified nucleotide with phosphorothioate linkage
  modified_base 11: mod_base = OTHER; note = 2'-O-methoxy-ethyl modified nucleotide with phosphorothioate linkage
  modified_base 12: mod_base = OTHER; note = 2'-O-methoxy-ethyl modified nucleotide with phosphorothioate linkage
  modified_base 13: mod_base = OTHER; note = 2'-O-methoxy-ethyl modified thymine with phosphorothioate linkage
  modified_base 14: mod_base = OTHER; note = 2'-O-methoxy-ethyl modified nucleotide with phosphorothioate linkage
  modified_base 15: mod_base = OTHER; note = 2'-O-methoxy-ethyl modified nucleotide with phosphorothioate linkage
  modified_base 16: mod_base = OTHER; note = 2'-O-methoxy-ethyl modified nucleotide with phosphorothioate linkage
  modified_base 17: mod_base = OTHER; note = 2'-O-methoxy-ethyl modified nucleotide with phosphorothioate linkage
  modified_base 18: mod_base = OTHER; note = 2'-O-methoxy-ethyl modified nucleotide with phosphorothioate linkage
  modified_base 19: mod_base = OTHER; note = 2'-O-methoxy-ethyl modified nucleotide with phosphorothioate linkage
  modified_base 20: mod_base = OTHER; note = 2'-O-methoxy-ethyl modified nucleotide
aacgtacagaaatgggaggg

SEQ ID NO: 590 - RNA, 20 nt, synthetic construct
  source 1..20: mol_type = other RNA
  modified_base 1: mod_base = OTHER; note = 2'-O-methoxy-ethyl modified nucleotide with phosphorothioate linkage
  modified_base 2: mod_base = OTHER; note = 2'-O-methoxy-ethyl modified nucleotide with phosphorothioate linkage
  modified_base 3: mod_base = OTHER; note = 2'-O-methoxy-ethyl modified nucleotide with phosphorothioate linkage
  modified_base 4: mod_base = OTHER; note = 2'-O-methoxy-ethyl modified nucleotide with phosphorothioate linkage
  modified_base 5: mod_base = OTHER; note = 2'-O-methoxy-ethyl modified thymine with phosphorothioate linkage
  modified_base 6: mod_base = OTHER; note = 2'-O-methoxy-ethyl modified nucleotide with phosphorothioate linkage
  modified_base 7: mod_base = OTHER; note = 2'-O-methoxy-ethyl modified nucleotide with phosphorothioate linkage
  modified_base 8: mod_base = OTHER; note = 2'-O-methoxy-ethyl modified nucleotide with phosphorothioate linkage
  modified_base 9: mod_base = OTHER; note = 2'-O-methoxy-ethyl modified nucleotide with phosphorothioate linkage
  modified_base 10: mod_base = OTHER; note = 2'-O-methoxy-ethyl modified nucleotide
  modified_base 11: mod_base = OTHER; note = 2'-O-methoxy-ethyl modified nucleotide with phosphorothioate linkage
  modified_base 12: mod_base = OTHER; note = 2'-O-methoxy-ethyl modified nucleotide with phosphorothioate linkage
  modified_base 13: mod_base = OTHER; note = 2'-O-methoxy-ethyl modified thymine with phosphorothioate linkage
  modified_base 14: mod_base = OTHER; note = 2'-O-methoxy-ethyl modified nucleotide with phosphorothioate linkage
  modified_base 15: mod_base = OTHER; note = 2'-O-methoxy-ethyl modified nucleotide with phosphorothioate linkage
  modified_base 16: mod_base = OTHER; note = 2'-O-methoxy-ethyl modified nucleotide with phosphorothioate linkage
  modified_base 17: mod_base = OTHER; note = 2'-O-methoxy-ethyl modified nucleotide with phosphorothioate linkage
  modified_base 18: mod_base = OTHER; note = 2'-O-methoxy-ethyl modified nucleotide with phosphorothioate linkage
  modified_base 19: mod_base = OTHER; note = 2'-O-methoxy-ethyl modified nucleotide with phosphorothioate linkage
  modified_base 20: mod_base = OTHER; note = 2'-O-methoxy-ethyl modified nucleotide
aacgtacagaaatgggaggg

SEQ ID NO: 591 - RNA, 20 nt, synthetic construct
  source 1..20: mol_type = other RNA
  modified_base 1: mod_base = OTHER; note = 2'-O-methoxy-ethyl modified nucleotide with phosphorothioate linkage
  modified_base 2: mod_base = OTHER; note = 2'-O-methoxy-ethyl modified nucleotide with phosphorothioate linkage
  modified_base 3: mod_base = OTHER; note = 2'-O-methoxy-ethyl modified nucleotide with phosphorothioate linkage
  modified_base 4: mod_base = OTHER; note = 2'-O-methoxy-ethyl modified nucleotide with phosphorothioate linkage
  modified_base 5: mod_base = OTHER; note = 2'-O-methoxy-ethyl modified thymine with phosphorothioate linkage
  modified_base 6: mod_base = OTHER; note = 2'-O-methoxy-ethyl modified nucleotide with phosphorothioate linkage
  modified_base 7: mod_base = OTHER; note = 2'-O-methoxy-ethyl modified nucleotide with phosphorothioate linkage
  modified_base 8: mod_base = OTHER; note = 2'-O-methoxy-ethyl modified nucleotide with phosphorothioate linkage
  modified_base 9: mod_base = OTHER; note = 2'-O-methoxy-ethyl modified nucleotide with phosphorothioate linkage
  modified_base 10: mod_base = OTHER; note = 2'-O-methoxy-ethyl modified nucleotide with phosphorothioate linkage
  modified_base 11: mod_base = OTHER; note = 2'-O-methoxy-ethyl modified nucleotide
  modified_base 12: mod_base = OTHER; note = 2'-O-methoxy-ethyl modified nucleotide with phosphorothioate linkage
  modified_base 13: mod_base = OTHER; note = 2'-O-methoxy-ethyl modified thymine with phosphorothioate linkage
  modified_base 14: mod_base = OTHER; note = 2'-O-methoxy-ethyl modified nucleotide with phosphorothioate linkage
  modified_base 15: mod_base = OTHER; note = 2'-O-methoxy-ethyl modified nucleotide with phosphorothioate linkage
  modified_base 16: mod_base = OTHER; note = 2'-O-methoxy-ethyl modified nucleotide with phosphorothioate linkage
  modified_base 17: mod_base = OTHER; note = 2'-O-methoxy-ethyl modified nucleotide with phosphorothioate linkage
  modified_base 18: mod_base = OTHER; note = 2'-O-methoxy-ethyl modified nucleotide with phosphorothioate linkage
  modified_base 19: mod_base = OTHER; note = 2'-O-methoxy-ethyl modified nucleotide with phosphorothioate linkage
  modified_base 20: mod_base = OTHER; note = 2'-O-methoxy-ethyl modified nucleotide
aacgtacagaaatgggaggg

SEQ ID NO: 592 - RNA, 20 nt, synthetic construct
  source 1..20: mol_type = other RNA
  modified_base 1: mod_base = OTHER; note = 2'-O-methoxy-ethyl modified nucleotide with phosphorothioate linkage
  modified_base 2: mod_base = OTHER; note = 2'-O-methoxy-ethyl modified nucleotide with phosphorothioate linkage
  modified_base 3: mod_base = OTHER; note = 2'-O-methoxy-ethyl modified nucleotide with phosphorothioate linkage
  modified_base 4: mod_base = OTHER; note = 2'-O-methoxy-ethyl modified nucleotide with phosphorothioate linkage
  modified_base 5: mod_base = OTHER; note = 2'-O-methoxy-ethyl modified thymine with phosphorothioate linkage
  modified_base 6: mod_base = OTHER; note = 2'-O-methoxy-ethyl modified nucleotide with phosphorothioate linkage
  modified_base 7: mod_base = OTHER; note = 2'-O-methoxy-ethyl modified nucleotide with phosphorothioate linkage
  modified_base 8: mod_base = OTHER; note = 2'-O-methoxy-ethyl modified nucleotide with phosphorothioate linkage
  modified_base 9: mod_base = OTHER; note = 2'-O-methoxy-ethyl modified nucleotide with phosphorothioate linkage
  modified_base 10: mod_base = OTHER; note = 2'-O-methoxy-ethyl modified nucleotide with phosphorothioate linkage
  modified_base 11: mod_base = OTHER; note = 2'-O-methoxy-ethyl modified nucleotide with phosphorothioate linkage
  modified_base 12: mod_base = OTHER; note = 2'-O-methoxy-ethyl modified nucleotide
  modified_base 13: mod_base = OTHER; note = 2'-O-methoxy-ethyl modified thymine with phosphorothioate linkage
  modified_base 14: mod_base = OTHER; note = 2'-O-methoxy-ethyl modified nucleotide with phosphorothioate linkage
  modified_base 15: mod_base = OTHER; note = 2'-O-methoxy-ethyl modified nucleotide with phosphorothioate linkage
  modified_base 16: mod_base = OTHER; note = 2'-O-methoxy-ethyl modified nucleotide with phosphorothioate linkage
  modified_base 17: mod_base = OTHER; note = 2'-O-methoxy-ethyl modified nucleotide with phosphorothioate linkage
  modified_base 18: mod_base = OTHER; note = 2'-O-methoxy-ethyl modified nucleotide with phosphorothioate linkage
  modified_base 19: mod_base = OTHER; note = 2'-O-methoxy-ethyl modified nucleotide with phosphorothioate linkage
  modified_base 20: mod_base = OTHER; note = 2'-O-methoxy-ethyl modified nucleotide
aacgtacagaaatgggaggg

SEQ ID NO: 593 - RNA, 20 nt, synthetic construct
  source 1..20: mol_type = other RNA
  modified_base 1: mod_base = OTHER; note = 2'-O-methoxy-ethyl modified nucleotide with phosphorothioate linkage
  modified_base 2: mod_base = OTHER; note = 2'-O-methoxy-ethyl modified nucleotide with phosphorothioate linkage
  modified_base 3: mod_base = OTHER; note = 2'-O-methoxy-ethyl modified nucleotide with phosphorothioate linkage
  modified_base 4: mod_base = OTHER; note = 2'-O-methoxy-ethyl modified nucleotide with phosphorothioate linkage
  modified_base 5: mod_base = OTHER; note = 2'-O-methoxy-ethyl modified thymine with phosphorothioate linkage
  modified_base 6: mod_base = OTHER; note = 2'-O-methoxy-ethyl modified nucleotide with phosphorothioate linkage
  modified_base 7: mod_base = OTHER; note = 2'-O-methoxy-ethyl modified nucleotide with phosphorothioate linkage
  modified_base 8: mod_base = OTHER; note = 2'-O-methoxy-ethyl modified nucleotide with phosphorothioate linkage
  modified_base 9: mod_base = OTHER; note = 2'-O-methoxy-ethyl modified nucleotide with phosphorothioate linkage
  modified_base 10: mod_base = OTHER; note = 2'-O-methoxy-ethyl modified nucleotide with phosphorothioate linkage
  modified_base 11: mod_base = OTHER; note = 2'-O-methoxy-ethyl modified nucleotide with phosphorothioate linkage
  modified_base 12: mod_base = OTHER; note = 2'-O-methoxy-ethyl modified nucleotide with phosphorothioate linkage
  modified_base 13: mod_base = OTHER; note = 2'-O-methoxy-ethyl modified thymine
  modified_base 14: mod_base = OTHER; note = 2'-O-methoxy-ethyl modified nucleotide with phosphorothioate linkage
  modified_base 15: mod_base = OTHER; note = 2'-O-methoxy-ethyl modified nucleotide with phosphorothioate linkage
  modified_base 16: mod_base = OTHER; note = 2'-O-methoxy-ethyl modified nucleotide with phosphorothioate linkage
  modified_base 17: mod_base = OTHER; note = 2'-O-methoxy-ethyl modified nucleotide with phosphorothioate linkage
  modified_base 18: mod_base = OTHER; note = 2'-O-methoxy-ethyl modified nucleotide with phosphorothioate linkage
  modified_base 19: mod_base = OTHER; note = 2'-O-methoxy-ethyl modified nucleotide with phosphorothioate linkage
  modified_base 20: mod_base = OTHER; note = 2'-O-methoxy-ethyl modified nucleotide
aacgtacagaaatgggaggg

SEQ ID NO: 594 - RNA, 20 nt, synthetic construct
  source 1..20: mol_type = other RNA
  modified_base 1: mod_base = OTHER; note = 2'-O-methoxy-ethyl modified nucleotide with phosphorothioate linkage
  modified_base 2: mod_base = OTHER; note = 2'-O-methoxy-ethyl modified nucleotide with phosphorothioate linkage
  modified_base 3: mod_base = OTHER; note = 2'-O-methoxy-ethyl modified nucleotide with phosphorothioate linkage
  modified_base 4: mod_base = OTHER; note = 2'-O-methoxy-ethyl modified nucleotide with phosphorothioate linkage
  modified_base 5: mod_base = OTHER; note = 2'-O-methoxy-ethyl modified thymine with phosphorothioate linkage
  modified_base 6: mod_base = OTHER; note = 2'-O-methoxy-ethyl modified nucleotide with phosphorothioate linkage
  modified_base 7: mod_base = OTHER; note = 2'-O-methoxy-ethyl modified nucleotide with phosphorothioate linkage
  modified_base 8: mod_base = OTHER; note = 2'-O-methoxy-ethyl modified nucleotide with phosphorothioate linkage
  modified_base 9: mod_base = OTHER; note = 2'-O-methoxy-ethyl modified nucleotide with phosphorothioate linkage
  modified_base 10: mod_base = OTHER; note = 2'-O-methoxy-ethyl modified nucleotide with phosphorothioate linkage
  modified_base 11: mod_base = OTHER; note = 2'-O-methoxy-ethyl modified nucleotide with phosphorothioate linkage
  modified_base 12: mod_base = OTHER; note = 2'-O-methoxy-ethyl modified nucleotide with phosphorothioate linkage
  modified_base 13: mod_base = OTHER; note = 2'-O-methoxy-ethyl modified thymine with phosphorothioate linkage
  modified_base 14: mod_base = OTHER; note = 2'-O-methoxy-ethyl modified nucleotide
  modified_base 15: mod_base = OTHER; note = 2'-O-methoxy-ethyl modified nucleotide with phosphorothioate linkage
  modified_base 16: mod_base = OTHER; note = 2'-O-methoxy-ethyl modified nucleotide with phosphorothioate linkage
  modified_base 17: mod_base = OTHER; note = 2'-O-methoxy-ethyl modified nucleotide with phosphorothioate linkage
  modified_base 18: mod_base = OTHER; note = 2'-O-methoxy-ethyl modified nucleotide with phosphorothioate linkage
  modified_base 19: mod_base = OTHER; note = 2'-O-methoxy-ethyl modified nucleotide with phosphorothioate linkage
  modified_base 20: mod_base = OTHER; note = 2'-O-methoxy-ethyl modified nucleotide
aacgtacagaaatgggaggg

SEQ ID NO: 595 - RNA, 20 nt, synthetic construct
  source 1..20: mol_type = other RNA
  modified_base 1: mod_base = OTHER; note = 2'-O-methoxy-ethyl modified nucleotide with phosphorothioate linkage
  modified_base 2: mod_base = OTHER; note = 2'-O-methoxy-ethyl modified nucleotide with phosphorothioate linkage
  modified_base 3: mod_base = OTHER; note = 2'-O-methoxy-ethyl modified nucleotide with phosphorothioate linkage
  modified_base 4: mod_base = OTHER; note = 2'-O-methoxy-ethyl modified nucleotide with phosphorothioate linkage
  modified_base 5: mod_base = OTHER; note = 2'-O-methoxy-ethyl modified thymine with phosphorothioate linkage
  modified_base 6: mod_base = OTHER; note = 2'-O-methoxy-ethyl modified nucleotide with phosphorothioate linkage
  modified_base 7: mod_base = OTHER; note = 2'-O-methoxy-ethyl modified nucleotide with phosphorothioate linkage
  modified_base 8: mod_base = OTHER; note = 2'-O-methoxy-ethyl modified nucleotide with phosphorothioate linkage
  modified_base 9: mod_base = OTHER; note = 2'-O-methoxy-ethyl modified nucleotide with phosphorothioate linkage
  modified_base 10: mod_base = OTHER; note = 2'-O-methoxy-ethyl modified nucleotide with phosphorothioate linkage
  modified_base 11: mod_base = OTHER; note = 2'-O-methoxy-ethyl modified nucleotide with phosphorothioate linkage
  modified_base 12: mod_base = OTHER; note = 2'-O-methoxy-ethyl modified nucleotide with phosphorothioate linkage
  modified_base 13: mod_base = OTHER; note = 2'-O-methoxy-ethyl modified thymine with phosphorothioate linkage
  modified_base 14: mod_base = OTHER; note = 2'-O-methoxy-ethyl modified nucleotide with phosphorothioate linkage
  modified_base 15: mod_base = OTHER; note = 2'-O-methoxy-ethyl modified nucleotide
  modified_base 16: mod_base = OTHER; note = 2'-O-methoxy-ethyl modified nucleotide with phosphorothioate linkage
  modified_base 17: mod_base = OTHER; note = 2'-O-methoxy-ethyl modified nucleotide with phosphorothioate linkage
  modified_base 18: mod_base = OTHER; note = 2'-O-methoxy-ethyl modified nucleotide with phosphorothioate linkage
  modified_base 19: mod_base = OTHER; note = 2'-O-methoxy-ethyl modified nucleotide with phosphorothioate linkage
  modified_base 20: mod_base = OTHER; note = 2'-O-methoxy-ethyl modified nucleotide
aacgtacagaaatgggaggg

SEQ ID NO: 596 - RNA, 20 nt, synthetic construct
  source 1..20: mol_type = other RNA
  modified_base 1: mod_base = OTHER; note = 2'-O-methoxy-ethyl modified nucleotide with phosphorothioate linkage
  modified_base 2: mod_base = OTHER; note = 2'-O-methoxy-ethyl modified nucleotide with phosphorothioate linkage
  modified_base 3: mod_base = OTHER; note = 2'-O-methoxy-ethyl modified nucleotide with phosphorothioate linkage
  modified_base 4: mod_base = OTHER; note = 2'-O-methoxy-ethyl modified nucleotide with phosphorothioate linkage
  modified_base 5: mod_base = OTHER; note = 2'-O-methoxy-ethyl modified thymine with phosphorothioate linkage
  modified_base 6: mod_base = OTHER; note = 2'-O-methoxy-ethyl modified nucleotide with phosphorothioate linkage
  modified_base 7: mod_base = OTHER; note = 2'-O-methoxy-ethyl modified nucleotide with phosphorothioate linkage
  modified_base 8: mod_base = OTHER; note = 2'-O-methoxy-ethyl modified nucleotide with phosphorothioate linkage
  modified_base 9: mod_base = OTHER; note = 2'-O-methoxy-ethyl modified nucleotide with phosphorothioate linkage
  modified_base 10: mod_base = OTHER; note = 2'-O-methoxy-ethyl modified nucleotide with phosphorothioate linkage
  modified_base 11: mod_base = OTHER; note = 2'-O-methoxy-ethyl modified nucleotide with phosphorothioate linkage
  modified_base 12: mod_base = OTHER; note = 2'-O-methoxy-ethyl modified nucleotide with phosphorothioate linkage
  modified_base 13: mod_base = OTHER; note = 2'-O-methoxy-ethyl modified thymine with phosphorothioate linkage
  modified_base 14: mod_base = OTHER; note = 2'-O-methoxy-ethyl modified nucleotide with phosphorothioate linkage
  modified_base 15: mod_base = OTHER; note = 2'-O-methoxy-ethyl modified nucleotide with phosphorothioate linkage
  modified_base 16: mod_base = OTHER; note = 2'-O-methoxy-ethyl modified nucleotide
  modified_base 17: mod_base = OTHER; note = 2'-O-methoxy-ethyl modified nucleotide with phosphorothioate linkage
  modified_base 18: mod_base = OTHER; note = 2'-O-methoxy-ethyl modified nucleotide with phosphorothioate linkage
  modified_base 19: mod_base = OTHER; note = 2'-O-methoxy-ethyl modified nucleotide with phosphorothioate linkage
  modified_base 20: mod_base = OTHER; note = 2'-O-methoxy-ethyl modified nucleotide
aacgtacagaaatgggaggg

SEQ ID NO: 597 - RNA, 20 nt, synthetic construct
  source 1..20: mol_type = other RNA
  modified_base 1: mod_base = OTHER; note = 2'-O-methoxy-ethyl modified nucleotide with phosphorothioate linkage
  modified_base 2: mod_base = OTHER; note = 2'-O-methoxy-ethyl modified nucleotide with phosphorothioate linkage
  modified_base 3: mod_base = OTHER; note = 2'-O-methoxy-ethyl modified nucleotide with phosphorothioate linkage
  modified_base 4: mod_base = OTHER; note = 2'-O-methoxy-ethyl modified nucleotide with phosphorothioate linkage
  modified_base 5: mod_base = OTHER; note = 2'-O-methoxy-ethyl modified thymine with phosphorothioate linkage
  modified_base 6: mod_base = OTHER; note = 2'-O-methoxy-ethyl modified nucleotide with phosphorothioate linkage
  modified_base 7: mod_base = OTHER; note = 2'-O-methoxy-ethyl modified nucleotide with phosphorothioate linkage
  modified_base 8: mod_base = OTHER; note = 2'-O-methoxy-ethyl modified nucleotide with phosphorothioate linkage
  modified_base 9: mod_base = OTHER; note = 2'-O-methoxy-ethyl modified nucleotide with phosphorothioate linkage
  modified_base 10: mod_base = OTHER; note = 2'-O-methoxy-ethyl modified nucleotide with phosphorothioate linkage
  modified_base 11: mod_base = OTHER; note = 2'-O-methoxy-ethyl modified nucleotide with phosphorothioate linkage
  modified_base 12: mod_base = OTHER; note = 2'-O-methoxy-ethyl modified nucleotide with phosphorothioate linkage
  modified_base 13: mod_base = OTHER; note = 2'-O-methoxy-ethyl modified thymine with phosphorothioate linkage
  modified_base 14: mod_base = OTHER; note = 2'-O-methoxy-ethyl modified nucleotide with phosphorothioate linkage
  modified_base 15: mod_base = OTHER; note = 2'-O-methoxy-ethyl modified nucleotide with phosphorothioate linkage
  modified_base 16: mod_base = OTHER; note = 2'-O-methoxy-ethyl modified nucleotide with phosphorothioate linkage
  modified_base 17: mod_base = OTHER; note = 2'-O-methoxy-ethyl modified nucleotide
  modified_base 18: mod_base = OTHER; note = 2'-O-methoxy-ethyl modified nucleotide with phosphorothioate linkage
  modified_base 19: mod_base = OTHER; note = 2'-O-methoxy-ethyl modified nucleotide with phosphorothioate linkage
  modified_base 20: mod_base = OTHER; note = 2'-O-methoxy-ethyl modified nucleotide
aacgtacagaaatgggaggg

SEQ ID NO: 598 - RNA, 20 nt, synthetic construct
  source 1..20: mol_type = other RNA
  modified_base 1: mod_base = OTHER; note = 2'-O-methoxy-ethyl modified nucleotide with phosphorothioate linkage
  modified_base 2: mod_base = OTHER; note = 2'-O-methoxy-ethyl modified nucleotide with phosphorothioate linkage
  modified_base 3: mod_base = OTHER; note = 2'-O-methoxy-ethyl modified nucleotide with phosphorothioate linkage
  modified_base 4: mod_base = OTHER; note = 2'-O-methoxy-ethyl modified nucleotide with phosphorothioate linkage
  modified_base 5: mod_base = OTHER; note = 2'-O-methoxy-ethyl modified thymine with phosphorothioate linkage
  modified_base 6: mod_base = OTHER; note = 2'-O-methoxy-ethyl modified nucleotide with phosphorothioate linkage
  modified_base 7: mod_base = OTHER; note = 2'-O-methoxy-ethyl modified nucleotide with phosphorothioate linkage
  modified_base 8: mod_base = OTHER; note = 2'-O-methoxy-ethyl modified nucleotide with phosphorothioate linkage
  modified_base 9: mod_base = OTHER; note = 2'-O-methoxy-ethyl modified nucleotide with phosphorothioate linkage
  modified_base 10: mod_base = OTHER; note = 2'-O-methoxy-ethyl modified nucleotide with phosphorothioate linkage
  modified_base 11: mod_base = OTHER; note = 2'-O-methoxy-ethyl modified nucleotide with phosphorothioate linkage
  modified_base 12: mod_base = OTHER; note = 2'-O-methoxy-ethyl modified nucleotide with phosphorothioate linkage
  modified_base 13: mod_base = OTHER; note = 2'-O-methoxy-ethyl modified thymine with phosphorothioate linkage
  modified_base 14: mod_base = OTHER; note = 2'-O-methoxy-ethyl modified nucleotide with phosphorothioate linkage
  modified_base 15: mod_base = OTHER; note = 2'-O-methoxy-ethyl modified nucleotide with phosphorothioate linkage
  modified_base 16: mod_base = OTHER; note = 2'-O-methoxy-ethyl modified nucleotide with phosphorothioate linkage
  modified_base 17: mod_base = OTHER; note = 2'-O-methoxy-ethyl modified nucleotide with phosphorothioate linkage
  modified_base 18: mod_base = OTHER; note = 2'-O-methoxy-ethyl modified nucleotide
  modified_base 19: mod_base = OTHER; note = 2'-O-methoxy-ethyl modified nucleotide with phosphorothioate linkage
  modified_base 20: mod_base = OTHER; note = 2'-O-methoxy-ethyl modified nucleotide
aacgtacagaaatgggaggg

SEQ ID NO: 599 - RNA, 20 nt, synthetic construct
  source 1..20: mol_type = other RNA
  modified_base 1: mod_base = OTHER; note = 2'-O-methoxy-ethyl modified nucleotide with phosphorothioate linkage
  modified_base 2: mod_base = OTHER; note = 2'-O-methoxy-ethyl modified nucleotide
  modified_base 3: mod_base = OTHER; note = 2'-O-methoxy-ethyl modified nucleotide with phosphorothioate linkage
  modified_base 4: mod_base = OTHER; note = 2'-O-methoxy-ethyl modified nucleotide with phosphorothioate linkage
  modified_base 5: mod_base = OTHER; note = 2'-O-methoxy-ethyl modified thymine with phosphorothioate linkage
  modified_base 6: mod_base = OTHER; note = 2'-O-methoxy-ethyl modified nucleotide with phosphorothioate linkage
  modified_base 7: mod_base = OTHER; note = 2'-O-methoxy-ethyl modified nucleotide with phosphorothioate linkage
  modified_base 8: mod_base = OTHER; note = 2'-O-methoxy-ethyl modified nucleotide with phosphorothioate linkage
  modified_base 9: mod_base = OTHER; note = 2'-O-methoxy-ethyl modified nucleotide with phosphorothioate linkage
  modified_base 10: mod_base = OTHER; note = 2'-O-methoxy-ethyl modified nucleotide with phosphorothioate linkage
  modified_base 11: mod_base = OTHER; note = 2'-O-methoxy-ethyl modified nucleotide with phosphorothioate linkage
  modified_base 12: mod_base = OTHER; note = 2'-O-methoxy-ethyl modified nucleotide with phosphorothioate linkage
  modified_base 13: mod_base = OTHER; note = 2'-O-methoxy-ethyl modified thymine with phosphorothioate linkage
  modified_base 14: mod_base = OTHER; note = 2'-O-methoxy-ethyl modified nucleotide with phosphorothioate linkage
  modified_base 15: mod_base = OTHER; note = 2'-O-methoxy-ethyl modified nucleotide with phosphorothioate linkage
  modified_base 16: mod_base = OTHER; note = 2'-O-methoxy-ethyl modified nucleotide with phosphorothioate linkage
  modified_base 17: mod_base = OTHER; note = 2'-O-methoxy-ethyl modified nucleotide with phosphorothioate linkage
  modified_base 18: mod_base = OTHER; note = 2'-O-methoxy-ethyl modified nucleotide
  modified_base 19: mod_base = OTHER; note = 2'-O-methoxy-ethyl modified nucleotide with phosphorothioate linkage
  modified_base 20: mod_base = OTHER; note = 2'-O-methoxy-ethyl modified nucleotide
aacgtacagaaatgggaggg

SEQ ID NO: 600 - RNA, 20 nt, synthetic construct
  source 1..20: mol_type = other RNA
  modified_base 1: mod_base = OTHER; note = 2'-O-methoxy-ethyl modified nucleotide with phosphorothioate linkage
  modified_base 2: mod_base = OTHER; note = 2'-O-methoxy-ethyl modified nucleotide with phosphorothioate linkage
  modified_base 3: mod_base = OTHER; note = 2'-O-methoxy-ethyl modified nucleotide
  modified_base 4: mod_base = OTHER; note = 2'-O-methoxy-ethyl modified nucleotide with phosphorothioate linkage
  modified_base 5: mod_base = OTHER; note = 2'-O-methoxy-ethyl modified thymine with phosphorothioate linkage
  modified_base 6: mod_base = OTHER; note = 2'-O-methoxy-ethyl modified nucleotide with phosphorothioate linkage
  modified_base 7: mod_base = OTHER; note = 2'-O-methoxy-ethyl modified nucleotide with phosphorothioate linkage
  modified_base 8: mod_base = OTHER; note = 2'-O-methoxy-ethyl modified nucleotide with phosphorothioate linkage
  modified_base 9: mod_base = OTHER; note = 2'-O-methoxy-ethyl modified nucleotide with phosphorothioate linkage
  modified_base 10: mod_base = OTHER; note = 2'-O-methoxy-ethyl modified nucleotide with phosphorothioate linkage
  modified_base 11: mod_base = OTHER; note = 2'-O-methoxy-ethyl modified nucleotide with phosphorothioate linkage
  modified_base 12: mod_base = OTHER; note = 2'-O-methoxy-ethyl modified nucleotide with phosphorothioate linkage
  modified_base 13: mod_base = OTHER; note = 2'-O-methoxy-ethyl modified thymine with phosphorothioate linkage
  modified_base 14: mod_base = OTHER; note = 2'-O-methoxy-ethyl modified nucleotide with phosphorothioate linkage
  modified_base 15: mod_base = OTHER; note = 2'-O-methoxy-ethyl modified nucleotide with phosphorothioate linkage
  modified_base 16: mod_base = OTHER; note = 2'-O-methoxy-ethyl modified nucleotide with phosphorothioate linkage
  modified_base 17: mod_base = OTHER; note = 2'-O-methoxy-ethyl modified nucleotide
  modified_base 18: mod_base = OTHER; note = 2'-O-methoxy-ethyl modified nucleotide with phosphorothioate linkage
  modified_base 19: mod_base = OTHER; note = 2'-O-methoxy-ethyl modified nucleotide with phosphorothioate linkage
  modified_base 20: mod_base = OTHER; note = 2'-O-methoxy-ethyl modified nucleotide
aacgtacagaaatgggaggg

SEQ ID NO: 601 - RNA, 20 nt, synthetic construct
  source 1..20: mol_type = other RNA
  modified_base 1: mod_base = OTHER; note = 2'-O-methoxy-ethyl modified nucleotide with phosphorothioate linkage
  modified_base 2: mod_base = OTHER; note = 2'-O-methoxy-ethyl modified nucleotide with phosphorothioate linkage
  modified_base 3: mod_base = OTHER; note = 2'-O-methoxy-ethyl modified nucleotide with phosphorothioate linkage
  modified_base 4: mod_base = OTHER; note = 2'-O-methoxy-ethyl modified nucleotide
  modified_base 5: mod_base = OTHER; note = 2'-O-methoxy-ethyl modified thymine with phosphorothioate linkage
  modified_base 6: mod_base = OTHER; note = 2'-O-methoxy-ethyl modified nucleotide with phosphorothioate linkage
  modified_base 7: mod_base = OTHER; note = 2'-O-methoxy-ethyl modified nucleotide with phosphorothioate linkage
  modified_base 8: mod_base = OTHER; note = 2'-O-methoxy-ethyl modified nucleotide with phosphorothioate linkage
  modified_base 9: mod_base = OTHER; note = 2'-O-methoxy-ethyl modified nucleotide with phosphorothioate linkage
  modified_base 10: mod_base = OTHER; note = 2'-O-methoxy-ethyl modified nucleotide with phosphorothioate linkage
  modified_base 11: mod_base = OTHER; note = 2'-O-methoxy-ethyl modified nucleotide with phosphorothioate linkage
  modified_base 12: mod_base = OTHER; note = 2'-O-methoxy-ethyl modified nucleotide with phosphorothioate linkage
  modified_base 13: mod_base = OTHER; note = 2'-O-methoxy-ethyl modified thymine with phosphorothioate linkage
  modified_base 14: mod_base = OTHER; note = 2'-O-methoxy-ethyl modified nucleotide with phosphorothioate linkage
  modified_base 15: mod_base = OTHER; note = 2'-O-methoxy-ethyl modified nucleotide with phosphorothioate linkage
  modified_base 16: mod_base = OTHER; note = 2'-O-methoxy-ethyl modified nucleotide
  modified_base 17: mod_base = OTHER; note = 2'-O-methoxy-ethyl modified nucleotide with phosphorothioate linkage
  modified_base 18: mod_base = OTHER; note = 2'-O-methoxy-ethyl modified nucleotide with phosphorothioate linkage
  modified_base 19: mod_base = OTHER; note = 2'-O-methoxy-ethyl modified nucleotide with phosphorothioate linkage
  modified_base 20: mod_base = OTHER; note = 2'-O-methoxy-ethyl modified nucleotide
aacgtacagaaatgggaggg

SEQ ID NO: 602 - RNA, 20 nt, synthetic construct
  source 1..20: mol_type = other RNA
  modified_base 1: mod_base = OTHER; note = 2'-O-methoxy-ethyl modified nucleotide with phosphorothioate linkage
  modified_base 2: mod_base = OTHER; note = 2'-O-methoxy-ethyl modified nucleotide with phosphorothioate linkage
  modified_base 3: mod_base = OTHER; note = 2'-O-methoxy-ethyl modified nucleotide with phosphorothioate linkage
  modified_base 4: mod_base = OTHER; note = 2'-O-methoxy-ethyl modified nucleotide with phosphorothioate linkage
  modified_base 5: mod_base = OTHER; note = 2'-O-methoxy-ethyl modified thymine
  modified_base 6: mod_base = OTHER; note = 2'-O-methoxy-ethyl modified nucleotide with phosphorothioate linkage
  modified_base 7: mod_base = OTHER; note = 2'-O-methoxy-ethyl modified nucleotide with phosphorothioate linkage
  modified_base 8: mod_base = OTHER; note = 2'-O-methoxy-ethyl modified nucleotide with phosphorothioate linkage
  modified_base 9: mod_base = OTHER; note = 2'-O-methoxy-ethyl modified nucleotide with phosphorothioate linkage
  modified_base 10: mod_base = OTHER; note = 2'-O-methoxy-ethyl modified nucleotide with phosphorothioate linkage
  modified_base 11: mod_base = OTHER; note = 2'-O-methoxy-ethyl modified nucleotide with phosphorothioate linkage
  modified_base 12: mod_base = OTHER; note = 2'-O-methoxy-ethyl modified nucleotide with phosphorothioate linkage
  modified_base 13: mod_base = OTHER; note = 2'-O-methoxy-ethyl modified thymine with phosphorothioate linkage
  modified_base 14: mod_base = OTHER; note = 2'-O-methoxy-ethyl modified nucleotide with phosphorothioate linkage
  modified_base 15: mod_base = OTHER; note = 2'-O-methoxy-ethyl modified nucleotide
  modified_base 16: mod_base = OTHER; note = 2'-O-methoxy-ethyl modified nucleotide with phosphorothioate linkage
  modified_base 17: mod_base = OTHER; note = 2'-O-methoxy-ethyl modified nucleotide with phosphorothioate linkage
  modified_base 18: mod_base = OTHER; note = 2'-O-methoxy-ethyl modified nucleotide with phosphorothioate linkage
  modified_base 19: mod_base = OTHER; note = 2'-O-methoxy-ethyl modified nucleotide with phosphorothioate linkage
  modified_base 20: mod_base = OTHER; note = 2'-O-methoxy-ethyl modified nucleotide
aacgtacagaaatgggaggg

SEQ ID NO: 603 - RNA, 20 nt, synthetic construct
  source 1..20: mol_type = other RNA
  modified_base 1: mod_base = OTHER; note = 2'-O-methoxy-ethyl modified nucleotide with phosphorothioate linkage
  modified_base 2: mod_base = OTHER; note = 2'-O-methoxy-ethyl modified nucleotide with phosphorothioate linkage
  modified_base 3: mod_base = OTHER; note = 2'-O-methoxy-ethyl modified nucleotide with phosphorothioate linkage
  modified_base 4: mod_base = OTHER; note = 2'-O-methoxy-ethyl modified nucleotide with phosphorothioate linkage
  modified_base 5: mod_base = OTHER; note = 2'-O-methoxy-ethyl modified thymine with phosphorothioate linkage
  modified_base 6: mod_base = OTHER; note = 2'-O-methoxy-ethyl modified nucleotide
  modified_base 7: mod_base = OTHER; note = 2'-O-methoxy-ethyl modified nucleotide with phosphorothioate linkage
  modified_base 8: mod_base = OTHER; note = 2'-O-methoxy-ethyl modified nucleotide with phosphorothioate linkage
  modified_base 9: mod_base = OTHER; note = 2'-O-methoxy-ethyl modified nucleotide with phosphorothioate linkage
  modified_base 10: mod_base = OTHER; note = 2'-O-methoxy-ethyl modified nucleotide with phosphorothioate linkage
  modified_base 11: mod_base = OTHER; note = 2'-O-methoxy-ethyl modified nucleotide with phosphorothioate linkage
  modified_base 12: mod_base = OTHER; note = 2'-O-methoxy-ethyl modified nucleotide with phosphorothioate linkage
  modified_base 13: mod_base = OTHER; note = 2'-O-methoxy-ethyl modified thymine with phosphorothioate linkage
  modified_base 14: mod_base = OTHER; note = 2'-O-methoxy-ethyl modified nucleotide
  modified_base 15: mod_base = OTHER; note = 2'-O-methoxy-ethyl modified nucleotide with phosphorothioate linkage
  modified_base 16: mod_base = OTHER; note = 2'-O-methoxy-ethyl modified nucleotide with phosphorothioate linkage
  modified_base 17: mod_base = OTHER; note = 2'-O-methoxy-ethyl modified nucleotide with phosphorothioate linkage
  modified_base 18: mod_base = OTHER; note = 2'-O-methoxy-ethyl modified nucleotide with phosphorothioate linkage
  modified_base 19: mod_base = OTHER; note = 2'-O-methoxy-ethyl modified nucleotide with phosphorothioate linkage
  modified_base 20: mod_base = OTHER; note = 2'-O-methoxy-ethyl modified nucleotide
aacgtacagaaatgggaggg

SEQ ID NO: 604 - RNA, 20 nt, synthetic construct
  source 1..20: mol_type = other RNA
  modified_base 1: mod_base = OTHER; note = 2'-O-methoxy-ethyl modified nucleotide with phosphorothioate linkage
  modified_base 2: mod_base = OTHER; note = 2'-O-methoxy-ethyl modified nucleotide with phosphorothioate linkage
  modified_base 3: mod_base = OTHER; note = 2'-O-methoxy-ethyl modified nucleotide with phosphorothioate linkage
  modified_base 4: mod_base = OTHER; note = 2'-O-methoxy-ethyl modified nucleotide with phosphorothioate linkage
  modified_base 5: mod_base = OTHER; note = 2'-O-methoxy-ethyl modified thymine with phosphorothioate linkage
  modified_base 6: mod_base = OTHER; note = 2'-O-methoxy-ethyl modified nucleotide with phosphorothioate linkage
  modified_base 7: mod_base = OTHER; note = 2'-O-methoxy-ethyl modified nucleotide
  modified_base 8: mod_base = OTHER; note = 2'-O-methoxy-ethyl modified nucleotide with phosphorothioate linkage
  modified_base 9: mod_base = OTHER; note = 2'-O-methoxy-ethyl modified nucleotide with phosphorothioate linkage
  modified_base 10: mod_base = OTHER; note = 2'-O-methoxy-ethyl modified nucleotide with phosphorothioate linkage
  modified_base 11: mod_base = OTHER; note = 2'-O-methoxy-ethyl modified nucleotide with phosphorothioate linkage
  modified_base 12: mod_base = OTHER; note = 2'-O-methoxy-ethyl modified nucleotide with phosphorothioate linkage
  modified_base 13: mod_base = OTHER; note = 2'-O-methoxy-ethyl modified thymine
  modified_base 14: mod_base = OTHER; note = 2'-O-methoxy-ethyl modified nucleotide with phosphorothioate linkage
  modified_base 15: mod_base = OTHER; note = 2'-O-methoxy-ethyl modified nucleotide with phosphorothioate linkage
  modified_base 16: mod_base = OTHER; note = 2'-O-methoxy-ethyl modified nucleotide with phosphorothioate linkage
  modified_base 17: mod_base = OTHER; note = 2'-O-methoxy-ethyl modified nucleotide with phosphorothioate linkage
  modified_base 18: mod_base = OTHER; note = 2'-O-methoxy-ethyl modified nucleotide with phosphorothioate linkage
  modified_base 19: mod_base = OTHER; note = 2'-O-methoxy-ethyl modified nucleotide with phosphorothioate linkage
  modified_base 20: mod_base = OTHER; note = 2'-O-methoxy-ethyl modified nucleotide
aacgtacagaaatgggaggg

SEQ ID NO: 605 - RNA, 20 nt, synthetic construct
  source 1..20: mol_type = other RNA
  modified_base 1: mod_base = OTHER; note = 2'-O-methoxy-ethyl modified nucleotide with phosphorothioate linkage
  modified_base 2: mod_base = OTHER; note = 2'-O-methoxy-ethyl modified nucleotide with phosphorothioate linkage
  modified_base 3: mod_base = OTHER; note = 2'-O-methoxy-ethyl modified nucleotide with phosphorothioate linkage
  modified_base 4: mod_base = OTHER; note = 2'-O-methoxy-ethyl modified nucleotide with phosphorothioate linkage
  modified_base 5: mod_base = OTHER; note = 2'-O-methoxy-ethyl modified thymine with phosphorothioate linkage
  modified_base 6: mod_base = OTHER; note = 2'-O-methoxy-ethyl modified nucleotide with phosphorothioate linkage
  modified_base 7: mod_base = OTHER; note = 2'-O-methoxy-ethyl modified nucleotide with phosphorothioate linkage
  modified_base 8: mod_base = OTHER; note = 2'-O-methoxy-ethyl modified nucleotide
  modified_base 9: mod_base = OTHER; note = 2'-O-methoxy-ethyl modified nucleotide with phosphorothioate linkage
  modified_base 10: mod_base = OTHER; note = 2'-O-methoxy-ethyl modified nucleotide with phosphorothioate linkage
  modified_base 11: mod_base = OTHER; note = 2'-O-methoxy-ethyl modified nucleotide with phosphorothioate linkage
  modified_base 12: mod_base = OTHER; note = 2'-O-methoxy-ethyl modified nucleotide
  modified_base 13: mod_base = OTHER; note = 2'-O-methoxy-ethyl modified thymine with phosphorothioate linkage
  modified_base 14: mod_base = OTHER; note = 2'-O-methoxy-ethyl modified nucleotide with phosphorothioate linkage
  modified_base 15: mod_base = OTHER; note = 2'-O-methoxy-ethyl modified nucleotide with phosphorothioate linkage
  modified_base 16: mod_base = OTHER; note = 2'-O-methoxy-ethyl modified nucleotide with phosphorothioate linkage
  modified_base 17: mod_base = OTHER; note = 2'-O-methoxy-ethyl modified nucleotide with phosphorothioate linkage
  modified_base 18: mod_base = OTHER; note = 2'-O-methoxy-ethyl modified nucleotide with phosphorothioate linkage
  modified_base 19: mod_base = OTHER; note = 2'-O-methoxy-ethyl modified nucleotide with phosphorothioate linkage
  modified_base 20: mod_base = OTHER; note = 2'-O-methoxy-ethyl modified nucleotide
aacgtacagaaatgggaggg

SEQ ID NO: 606 - RNA, 20 nt, synthetic construct
  source 1..20: mol_type = other RNA
  modified_base 1: mod_base = OTHER; note = 2'-O-methoxy-ethyl modified nucleotide with phosphorothioate linkage
  modified_base 2: mod_base = OTHER; note = 2'-O-methoxy-ethyl modified nucleotide with phosphorothioate linkage
  modified_base 3: mod_base = OTHER; note = 2'-O-methoxy-ethyl modified nucleotide with phosphorothioate linkage
  modified_base 4: mod_base = OTHER; note = 2'-O-methoxy-ethyl modified nucleotide with phosphorothioate linkage
  modified_base 5: mod_base = OTHER; note = 2'-O-methoxy-ethyl modified thymine with phosphorothioate linkage
  modified_base 6: mod_base = OTHER; note = 2'-O-methoxy-ethyl modified nucleotide with phosphorothioate linkage
  modified_base 7: mod_base = OTHER; note = 2'-O-methoxy-ethyl modified nucleotide with phosphorothioate linkage
  modified_base 8: mod_base = OTHER; note = 2'-O-methoxy-ethyl modified nucleotide with phosphorothioate linkage
  modified_base 9: mod_base = OTHER; note = 2'-O-methoxy-ethyl modified nucleotide
  modified_base 10: mod_base = OTHER; note = 2'-O-methoxy-ethyl modified nucleotide with phosphorothioate linkage
  modified_base 11: mod_base = OTHER; note = 2'-O-methoxy-ethyl modified nucleotide
  modified_base 12: mod_base = OTHER; note = 2'-O-methoxy-ethyl modified nucleotide with phosphorothioate linkage
  modified_base 13: mod_base = OTHER; note = 2'-O-methoxy-ethyl modified thymine with phosphorothioate linkage
  modified_base 14: mod_base = OTHER; note = 2'-O-methoxy-ethyl modified nucleotide with phosphorothioate linkage
  modified_base 15: mod_base = OTHER; note = 2'-O-methoxy-ethyl modified nucleotide with phosphorothioate linkage
  modified_base 16: mod_base = OTHER; note = 2'-O-methoxy-ethyl modified nucleotide with phosphorothioate linkage
  modified_base 17: mod_base = OTHER; note = 2'-O-methoxy-ethyl modified nucleotide with phosphorothioate linkage
  modified_base 18: mod_base = OTHER; note = 2'-O-methoxy-ethyl modified nucleotide with phosphorothioate linkage
  modified_base 19: mod_base = OTHER; note = 2'-O-methoxy-ethyl modified nucleotide with phosphorothioate linkage
  modified_base 20: mod_base = OTHER; note = 2'-O-methoxy-ethyl modified nucleotide
aacgtacagaaatgggaggg

SEQ ID NO: 607 - RNA, 20 nt, synthetic construct
  source 1..20: mol_type = other RNA
  modified_base 1: mod_base = OTHER; note = 2'-O-methoxy-ethyl modified nucleotide with phosphorothioate linkage
  modified_base 2: mod_base = OTHER; note = 2'-O-methoxy-ethyl modified nucleotide with phosphorothioate linkage
  modified_base 3: mod_base = OTHER; note = 2'-O-methoxy-ethyl modified nucleotide with phosphorothioate linkage
  modified_base 4: mod_base = OTHER; note = 2'-O-methoxy-ethyl modified nucleotide with phosphorothioate linkage
  modified_base 5: mod_base = OTHER; note = 2'-O-methoxy-ethyl modified thymine with phosphorothioate linkage
  modified_base 6: mod_base = OTHER; note = 2'-O-methoxy-ethyl modified nucleotide with phosphorothioate linkage
  modified_base 7: mod_base = OTHER; note = 2'-O-methoxy-ethyl modified nucleotide with phosphorothioate linkage
  modified_base 8: mod_base = OTHER; note = 2'-O-methoxy-ethyl modified nucleotide with phosphorothioate linkage
  modified_base 9: mod_base = OTHER; note = 2'-O-methoxy-ethyl modified nucleotide
  modified_base 10: mod_base = OTHER; note = 2'-O-methoxy-ethyl modified nucleotide
  modified_base 11: mod_base = OTHER; note = 2'-O-methoxy-ethyl modified nucleotide with phosphorothioate linkage
  modified_base 12: mod_base = OTHER; note = 2'-O-methoxy-ethyl modified nucleotide with phosphorothioate linkage
  modified_base 13: mod_base = OTHER; note = 2'-O-methoxy-ethyl modified thymine with phosphorothioate linkage
  modified_base 14: mod_base = OTHER; note = 2'-O-methoxy-ethyl modified nucleotide with phosphorothioate linkage
  modified_base 15: mod_base = OTHER; note = 2'-O-methoxy-ethyl modified nucleotide with phosphorothioate linkage
  modified_base 16: mod_base = OTHER; note = 2'-O-methoxy-ethyl modified nucleotide with phosphorothioate linkage
  modified_base 17: mod_base = OTHER; note = 2'-O-methoxy-ethyl modified nucleotide with phosphorothioate linkage
  modified_base 18: mod_base = OTHER; note = 2'-O-methoxy-ethyl modified nucleotide with phosphorothioate linkage
  modified_base 19: mod_base = OTHER; note = 2'-O-methoxy-ethyl modified nucleotide with phosphorothioate linkage
  modified_base 20: mod_base = OTHER; note = 2'-O-methoxy-ethyl modified nucleotide
aacgtacagaaatgggaggg

SEQ ID NO: 608 - RNA, 20 nt, synthetic construct
  source 1..20: mol_type = other RNA
  modified_base 1: mod_base = OTHER; note = 2'-O-methoxy-ethyl modified nucleotide with phosphorothioate linkage
  modified_base 2: mod_base = OTHER; note = 2'-O-methoxy-ethyl modified nucleotide with phosphorothioate linkage
  modified_base 3: mod_base = OTHER; note = 2'-O-methoxy-ethyl modified nucleotide with phosphorothioate linkage
  modified_base 4: mod_base = OTHER; note = 2'-O-methoxy-ethyl modified nucleotide with phosphorothioate linkage
  modified_base 5: mod_base = OTHER; note = 2'-O-methoxy-ethyl modified thymine with phosphorothioate linkage
  modified_base 6: mod_base = OTHER; note = 2'-O-methoxy-ethyl modified nucleotide with phosphorothioate linkage
  modified_base 7: mod_base = OTHER; note = 2'-O-methoxy-ethyl modified nucleotide with phosphorothioate linkage
  modified_base 8: mod_base = OTHER; note = 2'-O-methoxy-ethyl modified nucleotide with phosphorothioate linkage
  modified_base 9: mod_base = OTHER; note = 2'-O-methoxy-ethyl modified nucleotide with phosphorothioate linkage
  modified_base 10: mod_base = OTHER; note = 2'-O-methoxy-ethyl modified nucleotide
  modified_base 11: mod_base = OTHER; note = 2'-O-methoxy-ethyl modified nucleotide
  modified_base 12: mod_base = OTHER; note = 2'-O-methoxy-ethyl modified nucleotide with phosphorothioate linkage
  modified_base 13: mod_base = OTHER; note = 2'-O-methoxy-ethyl modified thymine with phosphorothioate linkage
  modified_base 14: mod_base = OTHER; note = 2'-O-methoxy-ethyl modified nucleotide with phosphorothioate linkage
  modified_base 15: mod_base = OTHER; note = 2'-O-methoxy-ethyl modified nucleotide with phosphorothioate linkage
  modified_base 16: mod_base = OTHER; note = 2'-O-methoxy-ethyl modified nucleotide with phosphorothioate linkage
  modified_base 17: mod_base = OTHER; note = 2'-O-methoxy-ethyl modified nucleotide with phosphorothioate linkage
  modified_base 18: mod_base = OTHER; note = 2'-O-methoxy-ethyl modified nucleotide with phosphorothioate linkage
  modified_base 19: mod_base = OTHER; note = 2'-O-methoxy-ethyl modified nucleotide with phosphorothioate linkage
  modified_base 20: mod_base = OTHER; note = 2'-O-methoxy-ethyl modified nucleotide
aacgtacagaaatgggaggg

SEQ ID NO: 609 - RNA, 20 nt, synthetic construct
  source 1..20: mol_type = other RNA
  modified_base 1: mod_base = OTHER; note = 2'-O-methoxy-ethyl modified nucleotide with phosphorothioate linkage
  modified_base 2: mod_base = OTHER; note = 2'-O-methoxy-ethyl modified nucleotide
  modified_base 3: mod_base = OTHER; note = 2'-O-methoxy-ethyl modified nucleotide with phosphorothioate linkage
  modified_base 4: mod_base = OTHER; note = 2'-O-methoxy-ethyl modified nucleotide with phosphorothioate linkage
  modified_base 5: mod_base = OTHER; note = 2'-O-methoxy-ethyl modified thymine with phosphorothioate linkage
  modified_base 6: mod_base = OTHER; note = 2'-O-methoxy-ethyl modified nucleotide with phosphorothioate linkage
  modified_base 7: mod_base = OTHER; note = 2'-O-methoxy-ethyl modified nucleotide with phosphorothioate linkage
  modified_base 8: mod_base = OTHER; note = 2'-O-methoxy-ethyl modified nucleotide with phosphorothioate linkage
  modified_base 9: mod_base = OTHER; note = 2'-O-methoxy-ethyl modified nucleotide with phosphorothioate linkage
  modified_base 10: mod_base = OTHER; note = 2'-O-methoxy-ethyl modified nucleotide with phosphorothioate linkage
  modified_base 11: mod_base = OTHER; note = 2'-O-methoxy-ethyl modified nucleotide with phosphorothioate linkage
  modified_base 12: mod_base = OTHER; note = 2'-O-methoxy-ethyl modified nucleotide with phosphorothioate linkage
  modified_base 13: mod_base = OTHER; note = 2'-O-methoxy-ethyl modified thymine with phosphorothioate linkage
  modified_base 14: mod_base = OTHER; note = 2'-O-methoxy-ethyl modified nucleotide with phosphorothioate linkage
  modified_base 15: mod_base = OTHER; note = 2'-O-methoxy-ethyl modified nucleotide with phosphorothioate linkage
  modified_base 16: mod_base = OTHER; note = 2'-O-methoxy-ethyl modified nucleotide with phosphorothioate linkage
  modified_base 17: mod_base = OTHER; note = 2'-O-methoxy-ethyl modified nucleotide
  modified_base 18: mod_base = OTHER; note = 2'-O-methoxy-ethyl modified nucleotide with phosphorothioate linkage
  modified_base 19: mod_base = OTHER; note = 2'-O-methoxy-ethyl modified nucleotide with phosphorothioate linkage
  modified_base 20: mod_base = OTHER; note = 2'-O-methoxy-ethyl modified nucleotide
aacgtacagaaatgggaggg

SEQ ID NO: 610 - RNA, 20 nt, synthetic construct
  source 1..20: mol_type = other RNA
  modified_base 1: mod_base = OTHER; note = 2'-O-methoxy-ethyl modified nucleotide with phosphorothioate linkage
  modified_base 2: mod_base = OTHER; note = 2'-O-methoxy-ethyl modified nucleotide with phosphorothioate linkage
  modified_base 3: mod_base = OTHER; note = 2'-O-methoxy-ethyl modified nucleotide
  modified_base 4: mod_base = OTHER; note = 2'-O-methoxy-ethyl modified nucleotide with phosphorothioate linkage
  modified_base 5: mod_base = OTHER; note = 2'-O-methoxy-ethyl modified thymine with phosphorothioate linkage
  modified_base 6: mod_base = OTHER; note = 2'-O-methoxy-ethyl modified nucleotide with phosphorothioate linkage
  modified_base 7: mod_base = OTHER; note = 2'-O-methoxy-ethyl modified nucleotide with phosphorothioate linkage
  modified_base 8: mod_base = OTHER; note = 2'-O-methoxy-ethyl modified nucleotide with phosphorothioate linkage
  modified_base 9: mod_base = OTHER; note = 2'-O-methoxy-ethyl modified nucleotide with phosphorothioate linkage
  modified_base 10: mod_base = OTHER; note = 2'-O-methoxy-ethyl modified nucleotide with phosphorothioate linkage
  modified_base 11: mod_base = OTHER; note = 2'-O-methoxy-ethyl modified nucleotide with phosphorothioate linkage
  modified_base 12: mod_base = OTHER; note = 2'-O-methoxy-ethyl modified nucleotide with phosphorothioate linkage
  modified_base 13: mod_base = OTHER; note = 2'-O-methoxy-ethyl modified thymine with phosphorothioate linkage
  modified_base 14: mod_base = OTHER; note = 2'-O-methoxy-ethyl modified nucleotide with phosphorothioate linkage
  modified_base 15: mod_base = OTHER; note = 2'-O-methoxy-ethyl modified nucleotide with phosphorothioate linkage
  modified_base 16: mod_base = OTHER; note = 2'-O-methoxy-ethyl modified nucleotide with phosphorothioate linkage
  modified_base 17: mod_base = OTHER; note = 2'-O-methoxy-ethyl modified nucleotide with phosphorothioate linkage
  modified_base 18: mod_base = OTHER; note = 2'-O-methoxy-ethyl modified nucleotide
  modified_base 19: mod_base = OTHER; note = 2'-O-methoxy-ethyl modified nucleotide with phosphorothioate linkage
  modified_base 20: mod_base = OTHER; note = 2'-O-methoxy-ethyl modified nucleotide
aacgtacagaaatgggaggg

SEQ ID NO: 611 - RNA, 20 nt, synthetic construct
  source 1..20: mol_type = other RNA
  modified_base 1: mod_base = OTHER; note = 2'-O-methoxy-ethyl modified nucleotide with phosphorothioate linkage
  modified_base 2: mod_base = OTHER; note = 2'-O-methoxy-ethyl modified nucleotide with phosphorothioate linkage
  modified_base 3: mod_base = OTHER; note = 2'-O-methoxy-ethyl modified nucleotide
  modified_base 4: mod_base = OTHER; note = 2'-O-methoxy-ethyl modified nucleotide with phosphorothioate linkage
  modified_base 5: mod_base = OTHER; note = 2'-O-methoxy-ethyl modified thymine with phosphorothioate linkage
  modified_base 6: mod_base = OTHER; note = 2'-O-methoxy-ethyl modified nucleotide with phosphorothioate linkage
  modified_base 7: mod_base = OTHER; note = 2'-O-methoxy-ethyl modified nucleotide with phosphorothioate linkage
  modified_base 8: mod_base = OTHER; note = 2'-O-methoxy-ethyl modified nucleotide with phosphorothioate linkage
  modified_base 9: mod_base = OTHER; note = 2'-O-methoxy-ethyl modified nucleotide with phosphorothioate linkage
  modified_base 10: mod_base = OTHER; note = 2'-O-methoxy-ethyl modified nucleotide with phosphorothioate linkage
  modified_base 11: mod_base = OTHER; note = 2'-O-methoxy-ethyl modified nucleotide with phosphorothioate linkage
  modified_base 12: mod_base = OTHER; note = 2'-O-methoxy-ethyl modified nucleotide with phosphorothioate linkage
  modified_base 13: mod_base = OTHER; note = 2'-O-methoxy-ethyl modified thymine with phosphorothioate linkage
  modified_base 14: mod_base = OTHER; note = 2'-O-methoxy-ethyl modified nucleotide with phosphorothioate linkage
  modified_base 15: mod_base = OTHER; note = 2'-O-methoxy-ethyl modified nucleotide with phosphorothioate linkage
  modified_base 16: mod_base = OTHER; note = 2'-O-methoxy-ethyl modified nucleotide
  modified_base 17: mod_base = OTHER; note = 2'-O-methoxy-ethyl modified nucleotide with phosphorothioate linkage
  modified_base 18: mod_base = OTHER; note = 2'-O-methoxy-ethyl modified nucleotide with phosphorothioate linkage
  modified_base 19: mod_base = OTHER; note = 2'-O-methoxy-ethyl modified nucleotide with phosphorothioate linkage
  modified_base 20: mod_base = OTHER; note = 2'-O-methoxy-ethyl modified nucleotide
aacgtacagaaatgggaggg

SEQ ID NO: 612 - RNA, 20 nt, synthetic construct
  source 1..20: mol_type = other RNA
  modified_base 1: mod_base = OTHER; note = 2'-O-methoxy-ethyl modified nucleotide with phosphorothioate linkage
  modified_base 2: mod_base = OTHER; note = 2'-O-methoxy-ethyl modified nucleotide with phosphorothioate linkage
  modified_base 3: mod_base = OTHER; note = 2'-O-methoxy-ethyl modified nucleotide with phosphorothioate linkage
  modified_base 4: mod_base = OTHER; note = 2'-O-methoxy-ethyl modified nucleotide
  modified_base 5: mod_base = OTHER; note = 2'-O-methoxy-ethyl modified thymine with phosphorothioate linkage
  modified_base 6: mod_base = OTHER; note = 2'-O-methoxy-ethyl modified nucleotide with phosphorothioate linkage
  modified_base 7: mod_base = OTHER; note = 2'-O-methoxy-ethyl modified nucleotide with phosphorothioate linkage
  modified_base 8: mod_base = OTHER; note = 2'-O-methoxy-ethyl modified nucleotide with phosphorothioate linkage
  modified_base 9: mod_base = OTHER; note = 2'-O-methoxy-ethyl modified nucleotide with phosphorothioate linkage
  modified_base 10: mod_base = OTHER; note = 2'-O-methoxy-ethyl modified nucleotide with phosphorothioate linkage
  modified_base 11: mod_base = OTHER; note = 2'-O-methoxy-ethyl modified nucleotide with phosphorothioate linkage
  modified_base 12: mod_base = OTHER; note = 2'-O-methoxy-ethyl modified nucleotide with phosphorothioate linkage
  modified_base 13: mod_base = OTHER; note = 2'-O-methoxy-ethyl modified thymine with phosphorothioate linkage
  modified_base 14: mod_base = OTHER; note = 2'-O-methoxy-ethyl modified nucleotide with phosphorothioate linkage
  modified_base 15: mod_base = OTHER; note = 2'-O-methoxy-ethyl modified nucleotide with phosphorothioate linkage
  modified_base 16: mod_base = OTHER; note = 2'-O-methoxy-ethyl modified nucleotide with phosphorothioate linkage
  modified_base 17: mod_base = OTHER; note = 2'-O-methoxy-ethyl modified nucleotide
  modified_base 18: mod_base = OTHER; note = 2'-O-methoxy-ethyl modified nucleotide with phosphorothioate linkage
  modified_base 19: mod_base = OTHER; note = 2'-O-methoxy-ethyl modified nucleotide with phosphorothioate linkage
  modified_base 20: mod_base = OTHER; note = 2'-O-methoxy-ethyl modified nucleotide
aacgtacagaaatgggaggg

SEQ ID NO: 613 - RNA, 20 nt, synthetic construct
  source 1..20: mol_type = other RNA
  modified_base 1: mod_base = OTHER; note = 2'-O-methoxy-ethyl modified nucleotide with phosphorothioate linkage
  modified_base 2: mod_base = OTHER; note = 2'-O-methoxy-ethyl modified nucleotide with phosphorothioate linkage
  modified_base 3: mod_base = OTHER; note = 2'-O-methoxy-ethyl modified nucleotide with phosphorothioate linkage
  modified_base 4: mod_base = OTHER; note = 2'-O-methoxy-ethyl modified nucleotide
  modified_base 5: mod_base = OTHER; note = 2'-O-methoxy-ethyl modified thymine with phosphorothioate linkage
  modified_base 6: mod_base = OTHER; note = 2'-O-methoxy-ethyl modified nucleotide with phosphorothioate linkage
  modified_base 7: mod_base = OTHER; note = 2'-O-methoxy-ethyl modified nucleotide with phosphorothioate linkage
  modified_base 8: mod_base = OTHER; note = 2'-O-methoxy-ethyl modified nucleotide with phosphorothioate linkage
  modified_base 9: mod_base = OTHER; note = 2'-O-methoxy-ethyl modified nucleotide with phosphorothioate linkage
  modified_base 10: mod_base = OTHER; note = 2'-O-methoxy-ethyl modified nucleotide with phosphorothioate linkage
  modified_base 11: mod_base = OTHER; note = 2'-O-methoxy-ethyl modified nucleotide with phosphorothioate linkage
  modified_base 12: mod_base = OTHER; note = 2'-O-methoxy-ethyl modified nucleotide with phosphorothioate linkage
  modified_base 13: mod_base = OTHER; note = 2'-O-methoxy-ethyl modified thymine with phosphorothioate linkage
  modified_base 14: mod_base = OTHER; note = 2'-O-methoxy-ethyl modified nucleotide with phosphorothioate linkage
  modified_base 15: mod_base = OTHER; note = 2'-O-methoxy-ethyl modified nucleotide
  modified_base 16: mod_base = OTHER; note = 2'-O-methoxy-ethyl modified nucleotide with phosphorothioate linkage
  modified_base 17: mod_base = OTHER; note = 2'-O-methoxy-ethyl modified nucleotide with phosphorothioate linkage
  modified_base 18: mod_base = OTHER; note = 2'-O-methoxy-ethyl modified nucleotide with phosphorothioate linkage
  modified_base 19: mod_base = OTHER; note = 2'-O-methoxy-ethyl modified nucleotide with phosphorothioate linkage
  modified_base 20: mod_base = OTHER; note = 2'-O-methoxy-ethyl modified nucleotide
aacgtacagaaatgggaggg

SEQ ID NO: 614 - RNA, 20 nt, synthetic construct
  source 1..20: mol_type = other RNA
  modified_base 1: mod_base = OTHER; note = 2'-O-methoxy-ethyl modified nucleotide with phosphorothioate linkage
  modified_base 2: mod_base = OTHER; note = 2'-O-methoxy-ethyl modified nucleotide with phosphorothioate linkage
  modified_base 3: mod_base = OTHER; note = 2'-O-methoxy-ethyl modified nucleotide with phosphorothioate linkage
  modified_base 4: mod_base = OTHER; note = 2'-O-methoxy-ethyl modified nucleotide with phosphorothioate linkage
  modified_base 5: mod_base = OTHER; note = 2'-O-methoxy-ethyl modified thymine
  modified_base 6: mod_base = OTHER; note = 2'-O-methoxy-ethyl modified nucleotide with phosphorothioate linkage
  modified_base 7: mod_base = OTHER; note = 2'-O-methoxy-ethyl modified nucleotide with phosphorothioate linkage
  modified_base 8: mod_base = OTHER; note = 2'-O-methoxy-ethyl modified nucleotide with phosphorothioate linkage
  modified_base 9: mod_base = OTHER; note = 2'-O-methoxy-ethyl modified nucleotide with phosphorothioate linkage
  modified_base 10: mod_base = OTHER; note = 2'-O-methoxy-ethyl modified nucleotide with phosphorothioate linkage
  modified_base 11: mod_base = OTHER; note = 2'-O-methoxy-ethyl modified nucleotide with phosphorothioate linkage
  modified_base 12: mod_base = OTHER; note = 2'-O-methoxy-ethyl modified nucleotide with phosphorothioate linkage
  modified_base 13: mod_base = OTHER; note = 2'-O-methoxy-ethyl modified thymine with phosphorothioate linkage
  modified_base 14: mod_base = OTHER; note = 2'-O-methoxy-ethyl modified nucleotide with phosphorothioate linkage
  modified_base 15: mod_base = OTHER; note = 2'-O-methoxy-ethyl modified nucleotide with phosphorothioate linkage
  modified_base 16: mod_base = OTHER; note = 2'-O-methoxy-ethyl modified nucleotide
  modified_base 17: mod_base = OTHER; note = 2'-O-methoxy-ethyl modified nucleotide with phosphorothioate linkage
  modified_base 18: mod_base = OTHER; note = 2'-O-methoxy-ethyl modified nucleotide with phosphorothioate linkage
  modified_base 19: mod_base = OTHER; note = 2'-O-methoxy-ethyl modified nucleotide with phosphorothioate linkage
  modified_base 20: mod_base = OTHER; note = 2'-O-methoxy-ethyl modified nucleotide
aacgtacagaaatgggaggg

1. A modified antisense oligonucleotide (ASO), comprising a sequence complementary to a target nucleic acid sequence of a FOXG1 nucleic acid.

2. The modified ASO of claim 1, wherein the modified ASO comprises one or more modifications to any one of SEQ ID NO. 100, SEQ ID NO 101, or SEQ ID NO. 284.

3. The modified ASO of claim 1 or claim 2, wherein ASO comprises a modification within an inter-nucleoside linker or within a nucleoside.

4. The modified ASO of claim 3, wherein the modification comprises a modified inter-nucleoside linker and a modified nucleoside.

5. The modified ASO of any one of claims 1-4, wherein the modified ASO comprises at least 1 to 10 modified inter-nucleoside linkers.

6. The modified ASO of any one of claims 1-4, wherein the modified ASO comprises at least 10 to 20 modified inter-nucleoside linkers.

7. The modified antisense oligonucleotide of any one of claims 1-5, wherein the modified ASO comprises at least 1 to 10 modified nucleosides.

8. The modified ASO of any one of claims 1-5, wherein the modified ASO comprises at least 10 to 20 modified nucleosides.

9. The modified ASO of any one of claims 1-8, wherein the modified ASO comprises at least 10%, at least 25%, at least 50%, at least 75%, at least 80%, or at least 90% modified inter-nucleoside linkers.

10. The modified ASO of any one of claims 1-9, wherein the modified ASO comprises at least 10%, at least 25%, at least 50%, at least 75%, at least 80%, or at least 90% modified nucleosides.

11. The modified ASO of any one of claims 1-9, wherein the modified ASO comprises 16 nucleotides, 17 nucleotides, 18 nucleotides, 19 nucleotides, 20 nucleotides, 21 nucleotides, 22 nucleotides, or 23 nucleotides.

12. The modified ASO of any one of claims 1 to 11, wherein the FOXG1 nucleic acid comprises a 5′ untranslated region (5′ UTR) and a 3′ untranslated region (3′ UTR), and wherein the target sequence is located at the 5′ UTR or the 3′ UTR of the FOXG1 nucleic acid.

13. The modified ASO of claim 12, wherein the modified ASO hybridizes to a region of FOXG1 selected from any one of the regions of Table 1 or Table 2.

14. The modified ASO of claim 13, wherein the target sequence is located within a NM_005249.5_2000-2200_as region of the FOXG1 nucleic acid.

15. The modified ASO of claim 13, wherein the target sequence is located within a NM_005249.5_2900-3000_as region of the FOXG1 nucleic acid.

16. The modified ASO of claim 13, wherein the target sequence is NM_005249.5_2965-2984, NM_005249.5_2062-2081, or NM_005249.5_2061-2080.

17. The modified ASO of any one of claims 1 to 16, wherein the modified ASO is a single-stranded modified oligonucleotide.

18. The modified ASO of any one of claims 1 to 16, wherein the FOXG1 nucleic acid molecule is a ribonucleic acid (RNA).

19. The modified ASO of claim 18, wherein the RNA molecule is a messenger RNA (mRNA) molecule.

20. The modified ASO of any one of claims 1 to 19, wherein the modified ASO inhibits regulatory elements that reduce translation of the FOXG1 RNA.

21. The modified ASO of any one of claims 1 to 19, wherein the modified ASO inhibits regulatory elements that reduce stability of the FOXG1 RNA.

22. The modified ASO of claim 19, wherein the modified ASO inhibits regulatory elements located within the 3′ UTR of the FOXG1 RNA.

23. The modified ASO of claim 19, wherein the modified ASO sterically inhibits (1) miRNA binding and suppression of FOXG1 translation and/or (2) an RNA binding protein from binding to a regulatory sequence of the FOXG1 RNA and destabilizing the FOXG1 RNA.

24. The modified ASO of claim 19, wherein the modified ASO inhibits nuclease digestion of the FOXG1 RNA.

25. The modified ASO of any one of claims 1 to 24, wherein the modified ASO comprises one or more modifications selected from the group consisting of: a phosphorothioate linkage; a 2′-O-methoxy-ethyl A; a 2′-O-methoxy-ethyl T; a 2′-O-methoxy-ethyl C; a 2′-O-methoxy-ethyl G, a locked nucleic acid (LNA) A; a LNA T; a LNA C; and a LNA G.

26. The modified ASO of any one of claims 1 to 25, wherein the modified ASO comprises one of the sequences set forth in Table 6, Table 7, Table 8, or Table 12.

27. A pharmaceutical composition comprising the modified ASO of any one of claims 1 to 26 and a pharmaceutically acceptable carrier or diluent.

28. A method of modulating expression of a FOXG1 in a cell, comprising contacting the cell with the modified ASO of any one of claims 1 to 26.

29. The method of claim 28, wherein the cell is a located in a brain of an individual.

30. The method of claim 29, wherein the individual is a human.

31. The method of claim 29, wherein the individual comprises a mutated FOXG1 gene.

32. The method of claim 29, wherein the individual has a FOXG1 disease or disorder.

33. The method of claim 32, wherein the FOXG1 disease or disorder is FOXG1 syndrome.

34. The method of any one of claims 29 to 33, wherein the FOXG1 nucleic acid is a ribonucleic acid (RNA).

35. The method of claim 34, wherein the RNA is a messenger RNA (mRNA).

36. The method of any one of claims 29 to 35, wherein the modified ASO inhibits regulatory elements that reduce translation or stability of the FOXG1 RNA, thereby increasing an amount of FOXG1 protein in the cell.

37. The method of any one of claims 29 to 36, wherein modulating expression comprises increasing expression of a FOXG1 protein in the cell.

38. The method of any one of claims 29 to 36, wherein modulating expression comprises increasing stability or half-life of the FOXG1 nucleic acid in the cell.

39. The method of any one of claims 29 to 36, wherein modulating expression comprises increasing translation of a FOXG1 protein in the cell.

40. The method of any one of claims 29 to 39, wherein the modified ASO is administered to the individual by intrathecal injection, intracerebroventricular injection, inhalation, parenteral injection or infusion, or orally.

41. A method of treating or ameliorating a FOXG1 disease or disorder in an individual having, or at risk of having, the FOXG1 disease or disorder, comprising administering to the individual the modified ASO of any one of claims 1 to 26, thereby treating or ameliorating a FOXG1 disease in the individual.

42. The method of claim 41, wherein the individual is a human.

43. The method of claim 42, wherein the human is an unborn human.

44. The method of any one of claims 40 to 43, wherein the individual comprises a mutated FOXG1 gene.

45. The method of any one of claims 40 to 43, wherein the FOXG1 disease or disorder is FOXG1 syndrome.
